(19) United States
(12) Patent Application Publication
(10) Pub. No.: US 2005/0208602 A1
(43) Pub. Date: Sep. 22, 2005

(54) 89 human secreted proteins

(76) Inventors: Craig A. Rosen, Laytonsville, MD (US); Kevin P. Baker, Darnestown, MD (US); Charles E. Birse, North Potomac, MD (US); Gil H. Choi, Rockville, MD (US); Michele Fiscella, Bethesda, MD (US); George A. Komatsoulis, Silver Spring, MD (US); Paul A. Moore, North Bethesda, MD (US); Jian Ni, Germantown, MD (US); Henrik S. Olsen, Gaithersburg, MD (US); Steven M. Ruben, Brookeville, MD (US); Ping Wei, Agoura Hills, CA (US); D. Roxanne Duan, Bethesda, MD (US); Yanggu Shi, Gaithersburg, MD (US)

Correspondence Address: HUMAN GENOME SCIENCES INC;INTELLECTUAL PROPERTY DEPT., 14200 SHADY GROVE ROAD, ROCKVILLE, MD, 20850, US

(21) Appl. No.: 10/773,236

(22) Filed: Feb. 9, 2004

Related U.S. Application Data
(63) Continuation-in-part of application No. PCT/US02/25107, filed on Aug. 8, 2002.
(63) Continuation-in-part of application No. PCT/US02/33985, filed on Oct. 24, 2002.
(63) Continuation-in-part of application No. PCT/US02/35606, filed on Nov. 6, 2002.
(63) Continuation-in-part of application No. PCT/US03/04819, filed on Feb. 20, 2003.
(63) Continuation-in-part of application No. PCT/US03/04818, filed on Feb. 20, 2003.
(60) Provisional application No. 60/311,085, filed on Aug. 10, 2001.
(60) Provisional application No. 60/325,209, filed on Sep. 28, 2001.
(60) Provisional application No. 60/330,629, filed on Oct. 26, 2001.
(60) Provisional application No. 60/331,046, filed on Nov. 7, 2001.
(60) Provisional application No. 60/358,554, filed on Feb. 22, 2002.
(60) Provisional application No. 60/358,714, filed on Feb. 25, 2002.

(51) Int. Cl. G01N 33/53; G01N 33/537; G01N 33/543; A61K 38/17

(52) U.S. Cl. 435/7.92; 514/12

(57) ABSTRACT

The present invention relates to human secreted polypeptides, and isolated nucleic acid molecules encoding said polypeptides, useful for diagnosing and treating diseases, disorders, and/or conditions related to said human secreted proteins. Antibodies that bind these polypeptides are also encompassed by the present invention. Also encompassed by the invention are vectors, host cells, and recombinant and synthetic methods for producing said polynucleotides, polypeptides, and/or antibodies. The invention further encompasses screening methods for identifying agonists and antagonists of polynucleotides and polypeptides of the invention. The present invention further encompasses methods and compositions for inhibiting or enhancing the production and function of the polypeptides of the present invention.

[0001] This application is a continuation-in-part of International Application No. PCT/US02/25107, filed Aug. 8, 2002, which claims benefit under 35 U.S.C. §119(e) of U.S. Provisional Application No. 60/311,085, filed Aug. 10, 2001 and of U.S. Provisional Application No. 60/325,209, filed Sep. 28, 2001; this application is also a continuation-in-part of International Application No. PCT/US02/33985, filed Oct. 24, 2002, which claims benefit under 35 U.S.C. §119(e) of U.S. Provisional Application No. 60/330,629, filed Oct. 26, 2001; this application is also a continuation-in-part of International Application No. PCT/US02/35606, filed Nov. 6, 2002, which claims benefit under 35 U.S.C. §119(e) of U.S. Provisional Application No. 60/331,046, filed Nov. 7, 2001; this application is also a continuation-in-part of International Application No. PCT/US03/04819, filed Feb. 20, 2003, which claims benefit under 35 U.S.C. §119(e) of U.S. Provisional Application No. 60/358,554, filed Feb. 22, 2002; this application is also a continuation-in-part of International Application No. PCT/US03/04818, filed Feb. 20, 2003, which claims benefit under 35 U.S.C. §119(e) of U.S. Provisional Application No. 60/358,714, filed Feb. 25, 2002, each of the above-identified applications are herein incorporated by reference in their entireties.

### FIELD OF THE INVENTION

[0002] The present invention relates to human secreted proteins/polypeptides, and isolated nucleic acid molecules encoding said proteins/polypeptides, useful for detecting, preventing, diagnosing, prognosticating, treating, and/or ameliorating diseases and disorders related to said proteins/polypeptides (relatedness may be by direct or indirect association, by cause, by consequence, or by effect on said diseases and disorders). Antibodies that bind these polypeptides are also encompassed by the present invention. Also encompassed by the invention are vectors, host cells, and recombinant and synthetic methods for producing said polynucleotides, polypeptides, and/or antibodies. The invention further encompasses screening methods for identifying agonists and antagonists of polynucleotides and polypeptides of the invention. The present invention further encompasses methods and compositions for inhibiting or enhancing the production and function of the polypeptides of the present invention.

### BACKGROUND OF THE INVENTION

[0003] Unlike bacteria, which exist as a single compartment surrounded by a membrane, human cells and other eukaryotes are subdivided by membranes into many functionally distinct compartments. Each membrane-bounded compartment, or organelle, contains different proteins essential for the function of the organelle. The cell uses “sorting signals,” which are amino acid motifs located within the protein, to target proteins to particular cellular organelles.

[0004] One type of sorting signal, called a signal sequence, a signal peptide, or a leader sequence, directs a class of proteins to an organelle called the endoplasmic reticulum (ER). The ER separates the membrane-bounded proteins from all other types of proteins. Once localized to the ER, both groups of proteins can be further directed to another organelle called the Golgi apparatus. Here, the Golgi distributes the proteins to vesicles, including secretory vesicles, the cell membrane, lysosomes, and the other organelles.

[0005] Proteins targeted to the ER by a signal sequence can be released into the extracellular space as a secreted protein. For example, vesicles containing secreted proteins can fuse with the cell membrane and release their contents into the extracellular space—a process called exocytosis. Exocytosis can occur constitutively or after receipt of a triggering signal. In the latter case, the proteins are stored in secretory vesicles (or secretory granules) until exocytosis is triggered. Similarly, proteins residing on the cell membrane can also be secreted into the extracellular space by proteolytic cleavage of a “linker” holding the protein to the membrane.

[0006] Thus there exists a clear need for identifying and using novel secreted polynucleotides and polypeptides. Identification and sequencing of human genes is a major goal of modern scientific research. For example, by identifying genes and determining their sequences, scientists have been able to make large quantities of valuable human “gene products.” These include human insulin, interferon, Factor VIII, tumor necrosis factor, human growth hormone, tissue plasminogen activator, and numerous other compounds. Additionally, knowledge of gene sequences can provide the key to treatment or cure of genetic diseases (such as muscular dystrophy and cystic fibrosis).

[0007] Over the past few decades, an increasing percentage of the population has become diabetic. Diabetes mellitus is categorized into two types: Type I, known as Insulin-Dependent Diabetes Mellitus (IDDM), or Type II, known as Non-Insulin-Dependent Diabetes Mellitus (NIDDM). IDDM is an autoimmune disorder in which the insulin-secreting pancreatic beta cells of the islets of Langerhans are destroyed. In these individuals, recombinant insulin therapy is employed to maintain glucose homeostasis and normal energy metabolism. NIDDM, on the other hand, is a polygenic disorder with no one gene responsible for the progression of the disease.

[0008] In NIDDM, insulin resistance eventually leads to the abolishment of insulin secretion resulting in insulin deficiency. Insulin resistance, at least in part, ensues from a block at the level of glucose uptake and phosphorylation in humans. Diabetics demonstrate a decrease in expression in adipose tissue of insulin-receptor substrate 1 (“IRS1”) (Carvalho et al., FASEB J 13(15):2173-8 (1999)), glucose transporter 4 (“GLUT4”) (Garvey et al., Diabetes 41(4):465-75 (1992)), and the novel abundant protein M gene transcript 1 (“apM1”) (Statnick et al., Int J Exp Diabetes 1(2): 81-8 (2000)), as well as other as of yet unidentified factors. Insulin deficiency in NIDDM leads to failure of normal pancreatic beta-cell function and eventually to pancreatic-beta cell death.

[0009] Insulin affects fat, muscle, and liver. Insulin is the major regulator of energy metabolism. Malfunctioning of any step(s) in insulin secretion and/or action can lead to many disorders, including for example the dysregulation of oxygen utilization, adipogenesis, glycogenesis, lipogenesis, glucose uptake, protein synthesis, thermogenesis, and maintenance of the basal metabolic rate. This malfunctioning results in diseases and/or disorders that include, but are not limited to, hyperinsulinemia, insulin resistance, insulin deficiency, hyperglycemia, hyperlipidemia, hyperketonemia, and diabetes.

[0010] Numerous debilitating diabetes-related secondary effects include, but are not limited to, obesity, forms of blindness (cataracts and diabetic retinopathy), limb amputations, kidney failure, fatty liver, coronary artery disease, and neuropathy.

[0011] Some of the current drugs used to treat insulin resistance and/or diabetes (e.g., insulin secretagogues—sulfonylurea, insulin sensitizers—thiazolidenediones and metformin, and alpha-glucosidase and lipase inhibitors) are inadequate due to the dosage amounts and frequency with which they have to be administered as a result of poor pharmacokinetic properties, the lack of effective control over blood sugar levels, and potential side effects, among other reasons. Diabetes Therapeutic proteins in their native state or when recombinantly produced exhibit a rapid in vivo clearance. Typically, significant amounts of therapeutics are required to be effective during therapy. In addition, small molecules smaller than the 20 kDa range can be readily filtered through the renal tubules (glomerulus) leading to dose-dependent nephrotoxicity. Therefore, there is a need for improvement in treatment (e.g., a need for prolonging the effects of therapeutics of diabetes and/or diabetes related conditions).

### SUMMARY OF THE INVENTION

[0012] The present invention relates to human secreted proteins/polypeptides, and isolated nucleic acid molecules encoding said proteins/polypeptides, useful for detecting, preventing, diagnosing, prognosticating, treating, and/or ameliorating diseases and disorders related to said proteins/polypeptides (relatedness may be by direct or indirect association, or by cause, consequence, or effect on said diseases and disorders). Antibodies that bind these polypeptides are also encompassed by the present invention. Also encompassed by the invention are vectors, host cells, and recombinant and synthetic methods for producing said polynucleotides, polypeptides, and/or antibodies. The invention further encompasses screening methods for identifying agonists and antagonists of polynucleotides and polypeptides of the invention. The present invention further encompasses methods and compositions for inhibiting or enhancing the production and function of the polypeptides of the present invention.

### DETAILED DESCRIPTION

Polynucleotides and Polypeptides of the Invention

Features of Protein Encoded by Gene No: 1

[0013] This gene is expressed primarily in placenta and to a lesser extent in skeletal muscle, pancreas, brain, and liver.

[0014] Therefore, polynucleotides and polypeptides of the invention are useful as reagents for differential identification of the tissue(s) or cell type(s) present in a biological sample and for diagnosis of diseases and conditions which include but are not limited to: diabetes (for example, type II diabetes). Similarly, polypeptides and antibodies directed to these polypeptides are useful in providing immunological probes for differential identification of the tissue(s) or cell type(s). For a number of disorders of the above tissues or cells, particularly of the endocrine system, expression of this gene at significantly higher or lower levels may be routinely detected in certain tissues or cell types (e.g., cancerous and wounded tissues) or bodily fluids (e.g., serum, plasma, urine, synovial fluid and spinal fluid) or another tissue or sample taken from an individual having such a disorder, relative to the standard gene expression level, i.e., the expression level in healthy tissue or bodily fluid from an individual not having the disorder.

[0015] The tissue distribution indicates that polynucleotides and polypeptides corresponding to this gene are useful for detection, prevention, and/or treatment of diabetes (for example, type II diabetes), liver cancer, muscular dystrophy, and pancreatic cancer.

Features of Protein Encoded by Gene No: 2

[0016] This gene is expressed primarily in the liver.

[0017] Polynucleotides and polypeptides of the invention are useful as reagents for differential identification of the tissue(s) or cell type(s) present in a biological sample and for diagnosis of diseases and conditions which include but are not limited to: diabetes (for example, type II diabetes) and liver cancer. Similarly, polypeptides and antibodies directed to these polypeptides are useful in providing immunological probes for differential identification of the tissue(s) or cell type(s). For a number of disorders of the above tissues or cells, particularly of the digestive system, expression of this gene at significantly higher or lower levels may be routinely detected in certain tissues or cell types (e.g., cancerous and wounded tissues) or bodily fluids (e.g., serum, plasma, urine, synovial fluid and spinal fluid) or another tissue or sample taken from an individual having such a disorder, relative to the standard gene expression level, i.e., the expression level in healthy tissue or bodily fluid from an individual not having the disorder.

[0018] The tissue distribution indicates that polynucleotides and polypeptides corresponding to this gene are useful for detection, prevention, and/or treatment of diabetes (for example, type II diabetes) and liver disorders (for, example hepatic cancer.

Features of Protein Encoded by Gene No: 3

[0019] This gene is expressed primarily in skelatal muscle and kidney.

[0020] Polynucleotides and polypeptides of the invention are useful as reagents for differential identification of the tissue(s) or cell type(s) present in a biological sample and for diagnosis of diseases and conditions which include but are not limited to: diabeetes (for example, type II diabetes), muscular dystrophy and kidney cancer. Similarly, polypeptides and antibodies directed to these polypeptides are useful in providing immunological probes for differential identification of the tissue(s) or cell type(s). For a number of disorders of the above tissues or cells, particularly of the endocrine system, expression of this gene at significantly higher or lower levels may be routinely detected in certain tissues or cell types (e.g., cancerous and wounded tissues) or bodily fluids (e.g., serum, plasma, urine, synovial fluid and spinal fluid) or another tissue or sample taken from an individual having such a disorder, relative to the standard gene expression level, i.e., the expression level in healthy tissue or bodily fluid from an individual not having the disorder.

[0021] The tissue distribution indicates that polynucleotides and polypeptides corresponding to this gene are useful for useful for detection, prevention, and/or treatment of diabetes (for example, type II diabetes), muscular dystrophy, and kidney cancer.

Features of Protein Encoded by Gene No: 4

[0022] The translation product of this gene shares sequence homology with Tex261, a gene related but distinct from steroidogenic acute regulatory (StAR) gene, which is regulated during the development of germ cells.

[0023] This gene is expressed primarily in brain, adipocytes, reproductive and immune tissues and to a lesser extent in gastrointestinal tissue.

[0024] Polynucleotides and polypeptides of the invention are useful as reagents for differential identification of the tissue(s) or cell type(s) present in a biological sample and for diagnosis of diseases and conditions which include but are not limited to: disorders of the immune system, cancer, neurological, and gastrointestinal disorders. Similarly, polypeptides and antibodies directed to these polypeptides are useful in providing immunological probes for differential identification of the tissue(s) or cell type(s). For a number of disorders of the above tissues or cells, particularly of the immune and reproductive system, expression of this gene at significantly higher or lower levels may be routinely detected in certain tissues or cell types (e.g., immune, cancerous and wounded tissues) or bodily fluids (e.g., serum, plasma, urine, synovial fluid and spinal fluid) or another tissue or sample taken from an individual having such a disorder, relative to the standard gene expression level, i.e., the expression level in healthy tissue or bodily fluid from an individual not having the disorder.

[0025] The tissue distribution and homology to Tex261, a gene regulated during the development of germ cells, indicates that polynucleotides and polypeptides corresponding to this gene are useful for detection, prevention, and/or treatment of disorders such as diabetes and disorders of the immune and reproductive system.

Features of Protein Encoded by Gene No: 5

[0026] This gene is expressed primarily in diabetic skeletal muscle.

[0027] Polynucleotides and polypeptides of the invention are useful as reagents for differential identification of the tissue(s) or cell type(s) present in a biological sample and for diagnosis of diseases and conditions which include but are not limited to: digestive, endocrine, and metabolic disorders. Similarly, polypeptides and antibodies directed to these polypeptides are useful in providing immunological probes for differential identification of the tissue(s) or cell type(s). For a number of disorders of the above tissues or cells, particularly of the endocrine and muscular systems, expression of this gene at significantly higher or lower levels may be routinely detected in certain tissues or cell types (e.g., cancerous and wounded tissues) or bodily fluids (e.g., serum, plasma, urine, synovial fluid and spinal fluid) or another tissue or sample taken from an individual having such a disorder, relative to the standard gene expression level, i.e., the expression level in healthy tissue or bodily fluid from an individual not having the disorder.

[0028] The tissue distribution indicates that polynucleotides and polypeptides corresponding to this gene are useful for detection, prevention, and/or treatment of diabetes (for example, types I and II diabetes), obesity, eating disorders including bulimia and anorexia, and muscular disorders.

Features of Protein Encoded by Gene No: 6

[0029] The translation product of this gene shares sequence homology with AX083426.

[0030] This gene is expressed primarily in digestive system tissues and to a lesser extent in reproductive system, immune/hematopoietic system white adipose tissue and adipose tissue.

[0031] Polynucleotides and polypeptides of the invention are useful as reagents for differential identification of the tissue(s) or cell type(s) present in a biological sample and for diagnosis of diseases and conditions which include but are not limited to: digestive disorders including colon cancer, immune diseases, diabetes, reproductive disorders. Similarly, polypeptides and antibodies directed to these polypeptides are useful in providing immunological probes for differential identification of the tissue(s) or cell type(s). For a number of disorders of the above tissues or cells, particularly of the digestive, immune, musculoskeletal, adipose, reproductive, expression of this gene at significantly higher or lower levels may be routinely detected in certain tissues or cell types (e.g., cancerous and wounded tissues) or bodily fluids (e.g., serum, plasma, urine, synovial fluid and spinal fluid) or another tissue or sample taken from an individual having such a disorder, relative to the standard gene expression level, i.e., the expression level in healthy tissue or bodily fluid from an individual not having the disorder.

[0032] The tissue distribution indicates that polynucleotides and polypeptides corresponding to this gene are useful for detection, prevention, and/or treatment of diabetes, digestive disorders, immune disases including autoimmune disorders, inflammatory diseases, and cancer.

Features of Protein Encoded by Gene No: 7

[0033] This gene is expressed primarily in diabetic Skeletal Muscle.

[0034] Polynucleotides and polypeptides of the invention are useful as reagents for differential identification of the tissue(s) or cell type(s) present in a biological sample and for diagnosis of diseases and conditions which include but are not limited to diabetes. Similarly, polypeptides and antibodies directed to these polypeptides are useful in providing immunological probes for differential identification of the tissue(s) or cell type(s). For a number of disorders of the above tissues or cells, particularly of the muscle, adipose tissues, and liver, expression of this gene at significantly higher or lower levels may be routinely detected in certain tissues or cell types (e.g., cancerous and wounded tissues) or bodily fluids (e.g., serum, plasma, urine, synovial fluid and spinal fluid) or another tissue or sample taken from an individual having such a disorder, relative to the standard gene expression level, i.e., the expression level in healthy tissue or bodily fluid from an individual not having the disorder.

[0035] The tissue distribution primarily in diabetic skeletal muscles indicates that polynucleotides and polypeptides corresponding to this gene are useful for detection, prevention, and/or treatment of type I and type II diabetes and diabetic-induced illness.

Features of Protein Encoded by Gene No: 8

[0036] This gene is expressed primarily in the pineal gland and the brain and to a lesser extent in skeletal muscle.

[0037] Polynucleotides and polypeptides of the invention are useful as reagents for differential identification of the tissue(s) or cell type(s) present in a biological sample and for diagnosis of diseases and conditions which include but are not limited to: diabetes (for example, type II diabetes). Similarly, polypeptides and antibodies directed to these polypeptides are useful in providing immunological probes for differential identification of the tissue(s) or cell type(s). For a number of disorders of the above tissues or cells, particularly of the central nervous system and the muscular system, expression of this gene at significantly higher or lower levels may be routinely detected in certain tissues or cell types (e.g., cancerous and wounded tissues) or bodily fluids (e.g., serum, plasma, urine, synovial fluid and spinal fluid) or another tissue or sample taken from an individual having such a disorder, relative to the standard gene expression level, i.e., the expression level in healthy tissue or bodily fluid from an individual not having the disorder.

[0038] The tissue distribution indicates that polynucleotides and polypeptides corresponding to this gene are useful for detection, prevention, and/or treatment of type II diabetes, muscular dystrophy, brain tumor, and circadian rythms.

Features of Protein Encoded by Gene No: 9

[0039] This gene is expressed primarily in Osteoblasts and bone tissues of normal and cancer samples and to a lesser extent in endometrial stromal cells, Hodgkin's Lymphoma, and Pre-Differentiated Adipocytes.

[0040] Polynucleotides and polypeptides of the invention are useful as reagents for differential identification of the tissue(s) or cell type(s) present in a biological sample and for diagnosis of diseases and conditions which include but are not limited to: bone cancers, Hodgkin's Lymphoma, and diabetes. Similarly, polypeptides and antibodies directed to these polypeptides are useful in providing immunological probes for differential identification of the tissue(s) or cell type(s). For a number of disorders of the above tissues or cells, particularly of the bone, immune and adipose tissues, expression of this gene at significantly higher or lower levels may be routinely detected in certain tissues or cell types (e.g., cancerous and wounded tissues) or bodily fluids (e.g., serum, plasma, urine, synovial fluid and spinal fluid) or another tissue or sample taken from an individual having such a disorder, relative to the standard gene expression level, i.e., the expression level in healthy tissue or bodily fluid from an individual not having the disorder.

[0041] The tissue distribution indicates that polynucleotides and polypeptides corresponding to this gene are useful for detection, prevention, and/or treatment of bone cancer and related disorders including osteosafcoma, osteoclastoma, chondrosarcoma, and Hodgekins's lymphoma, and diabetes (such as type I and type II diabetes).

Features of Protein Encoded by Gene No: 10

[0042] The translation product of this gene shares sequence homology with human calmitine, a mitochondrial calcium binding protein.

[0043] This gene is expressed primarily in skeletal muscles and to a lesser extent in the heart.

[0044] Polynucleotides and polypeptides of the invention are useful as reagents for differential identification of the tissue(s) or cell type(s) present in a biological sample and for diagnosis of diseases and conditions which include but are not limited to: type II diabetes and muscle dystrophy. Similarly, polypeptides and antibodies directed to these polypeptides are useful in providing immunological probes for differential identification of the tissue(s) or cell type(s). For a number of disorders of the above tissues or cells, particularly of the muscular system, expression of this gene at significantly higher or lower levels may be routinely detected in certain tissues or cell types (e.g., cancerous and wounded tissues) or bodily fluids (e.g., serum, plasma, urine, synovial fluid and spinal fluid) or another tissue or sample taken from an individual having such a disorder, relative to the standard gene expression level, i.e., the expression level in healthy tissue or bodily fluid from an individual not having the disorder.

[0045] The tissue distribution and homology to human calmitine, a mitochondrial calcium binding protein, indicates that polynucleotides and polypeptides corresponding to this gene are useful for detection, prevention, and/or treatment of type II diabetes and muscular dystrophy.

Features of Protein Encoded by Gene No: 11

[0046] This gene is expressed primarily in muscle, diabetic liver, adipose and immune cell types and to a lesser extent in most cell types.

[0047] Polynucleotides and polypeptides of the invention are useful as reagents for differential identification of the tissue(s) or cell type(s) present in a biological sample and for diagnosis of diseases and conditions which include but are not limited to: obesity and diabetes. Similarly, polypeptides and antibodies directed to these polypeptides are useful in providing immunological probes for differential identification of the tissue(s) or cell type(s). For a number of disorders of the above tissues or cells, particularly of the immune system and endocrine systems, expression of this gene at significantly higher or lower levels may be routinely detected in certain tissues or cell types (e.g., cancerous and wounded tissues) or bodily fluids (e.g., serum, plasma, urine, synovial fluid and spinal fluid) or another tissue or sample taken from an individual having such a disorder, relative to the standard gene expression level, i.e., the expression level in healthy tissue or bodily fluid from an individual not having the disorder.

[0048] The tissue distribution indicates that polynucleotides and polypeptides corresponding to this gene are useful for detection, prevention, and/or treatment of obesity, diabetes, and immune disorders.

Features of Protein Encoded by Gene No: 12

[0049] This gene is expressed primarily in diabetic skeletal muscle and in dendritic cells.

[0050] Polynucleotides and polypeptides of the invention are useful as reagents for differential identification of the tissue(s) or cell type(s) present in a biological sample and for diagnosis of diseases and conditions which include but are not limited to: diabetes, obesity and immune disorders. Similarly, polypeptides and antibodies directed to these polypeptides are useful in providing immunological probes for differential identification of the tissue(s) or cell type(s). For a number of disorders of the above tissues or cells, particularly of the digestive and immune systems expression of this gene at significantly higher or lower levels may be routinely detected in certain tissues or cell types (e.g., cancerous and wounded tissues) or bodily fluids (e.g., serum, plasma, urine, synovial fluid and spinal fluid) or another tissue or sample taken from an individual having such a disorder, relative to the standard gene expression level, i.e., the expression level in healthy tissue or bodily fluid from an individual not having the disorder.

[0051] The tissue distribution indicates that polynucleotides and polypeptides corresponding to this gene are useful for detection, prevention, and/or treatment of types I and II diabetes, obesity, and immune disorders such as arthritis, allergy, asthma, lupus, immunodeficiencies and leukemia.

Features of Protein Encoded by Gene No: 13

[0052] The translation product of this gene shares sequence homology with murine C-type lectin which is thought to be important in pathogen recognition and cell-cell interaction in innate immune modulation.

[0053] This gene is expressed primarily in Diabetic Liver.

[0054] Polynucleotides and polypeptides of the invention are useful as reagents for differential identification of the tissue(s) or cell type(s) present in a biological sample and for diagnosis of diseases and conditions which include but are not limited to: diabetes, sepsis syndrome and other bacterial, fungi, or viral infections, immune diseases, and liver diseases. Similarly, polypeptides and antibodies directed to these polypeptides are useful in providing immunological probes for differential identification of the tissue(s) or cell type(s). For a number of disorders of the above tissues or cells, particularly of the liver, diabetic tissues including adipose and muscle, and immune system, expression of this gene at significantly higher or lower levels may be routinely detected in certain tissues or cell types (e.g., cancerous and wounded tissues) or bodily fluids (e.g., serum, plasma, urine, synovial fluid and spinal fluid) or another tissue or sample taken from an individual having such a disorder, relative to the standard gene expression level, i.e., the expression level in healthy tissue or bodily fluid from an individual not having the disorder.

[0055] The tissue distribution and homology to C-type lectin indicates that polynucleotides and polypeptides corresponding to this gene are useful for detection, prevention, and/or treatment of diabetes (for example, type I and type II diabetes) and related conditions, diseases related to pathogen recognition including microbial infection and sepsis, immune disases including autoimmune disorders, inflammatory diseases, and cancer.

Features of Protein Encoded by Gene No: 14

[0056] In a specific embodiment, polypeptides of the invention, comprise or alternatively consist of, the following amino acid sequence:
[0057] MKLWVSALLMAWFGVLSCVQAEFFTSIGHMTDLIYAEKELVQSLKEYILVEEAKLS KIKSWANKMEALTSKSAADAEGYLAHPVNAYKLVKRLNTDWPALEDLVLQDSAAG FIANLSVQRQFFPTDEDEIGAAKALMRLQDTYRLDPGTISRGELPGTKYQAMLSVDD CFGMGRSAYNEGDYYHTVLWMEQVLKQLDAGEEATTTKSQVLDYLSYAVFQLGD LHRALELTRRLLSLDPSHERAGGNLRYFEQLLEEEREKTLTNQTEAELATPEGIYERP VDYLPERDVYESLCRGEGVKLTPRRQKRLFCRYHHGNRAPQLLIAPFKEEDEWDSPH IVRYYDVMSDEEIERIKEIAKPKLARATVRDPKTGVLTVASYRVSKSSWLEEDDDPV VARVNRRMQHITGLTVKTAELLQVANYGVGGQYEPHFDFSRNDERDTFKHLGTGN RVATFLNYMSDVEAGGATVFPDLGAAIWPKKGTAVFWYNLLRSGEGDYRTRHAAC PVLVGCKWVSNKWFHERGQEFLRPCGSTEVD (SEQ ID NO: ). Polynucleotides encoding these polypeptides are also encompassed by the invention as are antibodies that bind one or more of these polypeptides. Moreover, fragments and variants of these polypeptides (such as, for example, fragments as described herein, polypeptides at least 80%, 85%, 90%, 95%, 96%, 97%, 98%, or 99% identical to these polypeptides and polypeptides encoded by the polynucleotide which hybridizes, under stringent conditions, to the polynucleotide encoding these polypeptides , or the complement there of are encompassed by the invention. Antibodies that bind polypeptides of the invention are also encompassed by the invention. Polynucleotides encoding these polypeptides are also encompassed by the invention.

[0058] Polynucleotides and polypeptides of the invention are useful as reagents for differential identification of the tissue(s) or cell type(s) present in a biological sample and for diagnosis of diseases and conditions which include but are not limited to: disorders in digestive, reproductive, immune/hematopoietic, neural/sensory, musculoskeletal, excretory, endocrine, cardiovascular, connective/epithelial, and respiratory systems. Similarly, polypeptides and antibodies directed to these polypeptides are useful in providing immunological probes for differential identification of the tissue(s) or cell type(s). For a number of disorders of the above tissues or cells and/or those tissues indicated in Table 1B and Table 4 corresponding to this gene, particularly of the digestive, reproductive, immune/hematopoietic, neural/sensory systems, expression of this gene at significantly higher or lower levels may be routinely detected in certain tissues or cell types (e.g., cancerous and wounded tissues) or bodily fluids (e.g., serum, plasma, urine, synovial fluid and spinal fluid) or another tissue or sample taken from an individual having such a disorder, relative to the standard gene expression level, i.e., the expression level in healthy tissue or bodily fluid from an individual not having the disorder.

[0059] The tissue distribution indicates that polynucleotides and polypeptides corresponding to this gene are useful for detection, prevention, and/or treatment of diabetes (for example, types I and II diabetes), obesity, eating disorders including bulimia and anorexia, and muscular disorders. Elevated levels of expression in the prostate indicate a role in modulation of tumor progression.

Features of Protein Encoded by Gene No: 15

[0060] Polynucleotides and polypeptides of the invention are useful as reagents for differential identification of the tissue(s) or cell type(s) present in a biological sample and for diagnosis of diseases and conditions which include but are not limited to: disorders in digestive, reproductive, immune/hematopoietic, neural/sensory, musculoskeletal, excretory, endocrine, cardiovascular, connective/epithelial, and respiratory systems. Similarly, polypeptides and antibodies directed to these polypeptides are useful in providing immunological probes for differential identification of the tissue(s) or cell type(s). For a number of disorders of the above tissues or cells and/or those tissues indicated in Table 1B and Table 4 corresponding to this gene, particularly of the digestive, reproductive, immune/hematopoietic, neural/sensory systems, expression of this gene at significantly higher or lower levels may be routinely detected in certain tissues or cell types (e.g., cancerous and wounded tissues) or bodily fluids (e.g., serum, plasma, urine, synovial fluid and spinal fluid) or another tissue or sample taken from an individual having such a disorder, relative to the standard gene expression level, i.e., the expression level in healthy tissue or bodily fluid from an individual not having the disorder.

[0061] The tissue distribution indicates that polynucleotides and polypeptides corresponding to this gene are useful for detection, prevention, and/or treatment of diabetes (for example, types I and II diabetes), obesity, eating disorders including bulimia and anorexia, and muscular disorders. Elevated levels of expression in the prostate indicate a role in modulation of tumor progression.

Features of Protein Encoded by Gene No: 16

[0062] Polynucleotides and polypeptides of the invention are useful as reagents for differential identification of the tissue(s) or cell type(s) present in a biological sample and for diagnosis of diseases and conditions which include but are not limited to: disorders in digestive, reproductive, immune/hematopoietic, neural/sensory, musculoskeletal, excretory, endocrine, cardiovascular, connective/epithelial, and respiratory systems. Similarly, polypeptides and antibodies directed to these polypeptides are useful in providing immunological probes for differential identification of the tissue(s) or cell type(s). For a number of disorders of the above tissues or cells and/or those tissues indicated in Table 1B and Table 4 corresponding to this gene, particularly of the digestive, reproductive, immune/hematopoietic, neural/sensory systems, expression of this gene at significantly higher or lower levels may be routinely detected in certain tissues or cell types (e.g., cancerous and wounded tissues) or bodily fluids (e.g., serum, plasma, urine, synovial fluid and spinal fluid) or another tissue or sample taken from an individual having such a disorder, relative to the standard gene expression level, i.e., the expression level in healthy tissue or bodily fluid from an individual not having the disorder.

[0063] The tissue distribution indicates that polynucleotides and polypeptides corresponding to this gene are useful for detection, prevention, and/or treatment of diabetes (for example, types I and II diabetes), obesity, eating disorders including bulimia and anorexia, and muscular disorders. Elevated levels of expression in the prostate indicate a role in modulation of tumor progression.

Features of Protein Encoded by Gene No: 17

[0064] Polynucleotides and polypeptides of the invention are useful as reagents for differential identification of the tissue(s) or cell type(s) present in a biological sample and for diagnosis of diseases and conditions which include but are not limited to: disorders in digestive, reproductive, immune/hematopoietic, neural/sensory, musculoskeletal, excretory, endocrine, cardiovascular, connective/epithelial, and respiratory systems. Similarly, polypeptides and antibodies directed to these polypeptides are useful in providing immunological probes for differential identification of the tissue(s) or cell type(s). For a number of disorders of the above tissues or cells and/or those tissues indicated in Table 1B and Table 4 corresponding to this gene, particularly of the digestive, reproductive, immune/hematopoietic, neural/sensory systems, expression of this gene at significantly higher or lower levels may be routinely detected in certain tissues or cell types (e.g., cancerous and wounded tissues) or bodily fluids (e.g., serum, plasma, urine, synovial fluid and spinal fluid) or another tissue or sample taken from an individual having such a disorder, relative to the standard gene expression level, i.e., the expression level in healthy tissue or bodily fluid from an individual not having the disorder.

[0065] The tissue distribution indicates that polynucleotides and polypeptides corresponding to this gene are useful for detection, prevention, and/or treatment of diabetes (for example, types I and II diabetes), obesity, eating disorders including bulimia and anorexia, and muscular disorders. Elevated levels of expression in the prostate indicate a role in modulation of tumor progression.

Features of Protein Encoded by Gene No: 18

[0066] Polynucleotides and polypeptides of the invention are useful as reagents for differential identification of the tissue(s) or cell type(s) present in a biological sample and for diagnosis of diseases and conditions which include but are not limited to: disorders in digestive, reproductive, immune/hematopoietic, neural/sensory, musculoskeletal, excretory, endocrine, cardiovascular, connective/epithelial, and respiratory systems. Similarly, polypeptides and antibodies directed to these polypeptides are useful in providing immunological probes for differential identification of the tissue(s) or cell type(s). For a number of disorders of the above tissues or cells and/or those tissues indicated in Table 1B and Table 4 corresponding to this gene, particularly of the digestive, reproductive, immune/hematopoietic, neural/sensory systems, expression of this gene at significantly higher or lower levels may be routinely detected in certain tissues or cell types (e.g., cancerous and wounded tissues) or bodily fluids (e.g., serum, plasma, urine, synovial fluid and spinal fluid) or another tissue or sample taken from an individual having such a disorder, relative to the standard gene expression level, i.e., the expression level in healthy tissue or bodily fluid from an individual not having the disorder.

[0067] The tissue distribution indicates that polynucleotides and polypeptides corresponding to this gene are useful for detection, prevention, and/or treatment of diabetes (for example, types I and II diabetes), obesity, eating disorders including bulimia and anorexia, and muscular disorders. Elevated levels of expression in the prostate indicate a role in modulation of tumor progression.

Features of Protein Encoded by Gene No: 19

[0068] This gene is expressed primarily in immune/hematopoietic, reproductive, excretory tissues, and to a lesser extent in digestive, neural/sensory, musculoskeletal, and respiratory tissues.

[0069] Polynucleotides and polypeptides of the invention are useful as reagents for differential identification of the tissue(s) or cell type(s) present in a biological sample and for diagnosis of diseases and conditions which include but are not limited to: disorders in immune/hematopoietic, reproductive, excretory, digestive, neural/sensory, musculoskeletal, and respiratory systems. Similarly, polypeptides and antibodies directed to these polypeptides are useful in providing immunological probes for differential identification of the tissue(s) or cell type(s). For a number of disorders of the above tissues or cells and/or those tissues indicated in Table 1B and Table 4 corresponding to this gene, particularly of the immune/hematopoietic, reproductive, excretory systems, expression of this gene at significantly higher or lower levels may be routinely detected in certain tissues or cell types (e.g., cancerous and wounded tissues) or bodily fluids (e.g., serum, plasma, urine, synovial fluid and spinal fluid) or another tissue or sample taken from an individual having such a disorder, relative to the standard gene expression level, i.e., the expression level in healthy tissue or bodily fluid from an individual not having the disorder.

[0070] The tissue distribution indicates that polynucleotides and polypeptides corresponding to this gene are useful for detection, prevention, and/or treatment of diabetes (for example, types I and II diabetes), obesity, eating disorders including bulimia and anorexia, and muscular disorders. Elevated levels of expression in the prostate indicate a role in modulation of tumor progression.

[0071] In addition, the protein product of this clone is useful for the diagnosis and treatment of a variety of immune system disorders. Representative uses are described in the “Immune Activity” and “Infectious Disease” sections below, in Example 11, 13, 14, 16, 18, 19, 20, and 27, and elsewhere herein. Briefly, the expression of this gene product indicates a role in regulating the proliferation; survival; differentiation; and/or activation of hematopoietic cell lineages, including blood stem cells. This gene product is involved in the regulation of cytokine production, antigen presentation, or other processes suggesting a usefulness in the treatment of cancer (e.g. by boosting immune responses). Since the gene is expressed in cells of lymphoid origin, the natural gene product is involved in immune functions. Therefore it is also useful as an agent for immunological disorders including arthritis, asthma, immunodeficiency diseases such as AIDS, leukemia, rheumatoid arthritis, granulomatous disease, inflammatory bowel disease, sepsis, acne, neutropenia, neutrophilia, psoriasis, hypersensitivities, such as T-cell mediated cytotoxicity; immune reactions to transplanted organs and tissues, such as host-versus-graft and graft-versus-host diseases, or autoimmunity disorders, such as autoimmune infertility, lense tissue injury, demyelination, systemic lupus erythematosis, drug induced hemolytic anemia, rheumatoid arthritis, Sjogren's disease, and scleroderma. Moreover, the protein may represent a secreted factor that influences the differentiation or behavior of other blood cells, or that recruits hematopoietic cells to sites of injury. Thus, this gene product is thought to be useful in the expansion of stem cells and committed progenitors of various blood lineages, and in the differentiation and/or proliferation of various cell types.

Features of Protein Encoded by Gene No: 20

[0072] In specific embodiments, polypeptides of the invention comprise, or alternatively consists of, an amino acid sequence selected from the group:
[0073] MQYLYFQGAALSACSPCLGLFFPSCFPFRVPSLISLVSAAHRPAHQSVQILS VWFLASSVEGALSRILTLWGGGLGTGGNLMIQRFPQEECLEGSVPGQWQNLSSVLLV LISSVSIKFRSLF (SEQ ID NO: 59). Moreover, fragments and variants of these polypeptides (such as, for example, fragments as described herein, polypeptides at least 80%, 85%, 90%, 95%, 96%, 97%, 98%, or 99% identical to these polypeptides and polypeptides encoded by nucleic acids which hybridize, under stringent conditions, to the polynucleotide encoding these polypeptides, or the complement thereof are encompassed by the invention. Polynucleotides encoding these polypeptides are also encompassed by the inventions.

[0074] This gene is expressed primarily in skeletal muscle tissue.

[0075] Polynucleotides and polypeptides of the invention are useful as reagents for differential identification of the tissue(s) or cell type(s) present in a biological sample and for diagnosis of diseases and conditions which include but are not limited to: diabetes. Similarly, polypeptides and antibodies directed to these polypeptides are useful in providing immunological probes for differential identification of the tissue(s) or cell type(s). For a number of disorders of the above tissues or cells and/or those tissues indicated in Table 1B and Table 4 corresponding to this gene, particularly of the musculoskeletal and endocrine, expression of this gene at significantly higher or lower levels may be routinely detected in certain tissues or cell types (e.g., cancerous and wounded tissues) or bodily fluids (e.g., serum, plasma, urine, synovial fluid and spinal fluid) or another tissue or sample taken from an individual having such a disorder, relative to the standard gene expression level, i.e., the expression level in healthy tissue or bodily fluid from an individual not having the disorder.

[0076] The tissue distribution indicates that polynucleotides and polypeptides corresponding to this gene are useful for detection, prevention, and/or treatment of diabetes (for example, types I and II diabetes), obesity, eating disorders including bulimia and anorexia, and muscular disorders. Elevated levels of expression in the prostate indicate a role in modulation of tumor progression.

[0077] In addition, the protein product of this clone is useful for the diagnosis and treatment of a variety of immune system disorders. Representative uses are described in the “Immune Activity” and “Infectious Disease” sections below, in Example 11, 13, 14, 16, 18, 19, 20, and 27, and elsewhere herein. Briefly, the expression of this gene product indicates a role in regulating the proliferation; survival; differentiation; and/or activation of hematopoietic cell lineages, including blood stem cells. This gene product is involved in the regulation of cytokine production, antigen presentation, or other processes suggesting a usefulness in the treatment of cancer (e.g. by boosting immune responses). Since the gene is expressed in cells of lymphoid origin, the natural gene product is involved in immune functions. Therefore it is also useful as an agent for immunological disorders including arthritis, asthma, immunodeficiency diseases such as AIDS, leukemia, rheumatoid arthritis, granulomatous disease, inflammatory bowel disease, sepsis, acne, neutropenia, neutrophilia, psoriasis, hypersensitivities, such as T-cell mediated cytotoxicity; immune reactions to transplanted organs and tissues, such as host-versus-graft and graft-versus-host diseases, or autoimmunity disorders, such as autoimmune infertility, lense tissue injury, demyelination, systemic lupus erythematosis, drug induced hemolytic anemia, rheumatoid arthritis, Sjogren's disease, and scleroderma. Moreover, the protein may represent a secreted factor that influences the differentiation or behavior of other blood cells, or that recruits hematopoietic cells to sites of injury. Thus, this gene product is thought to be useful in the expansion of stem cells and committed progenitors of various blood lineages, and in the differentiation and/or proliferation of various cell types.

Features of Protein Encoded by Gene No: 21

[0078] In specific embodiments, polypeptides of the invention comprise, or alternatively consists of, the following amino acid sequence:
[0079] MPGIVSDRRGQRKXRSPXALPLWSWRSSTGDKTRCFQGGSRAHQVIRIIAQEETWQP DGDATWGLRGXAFQAEGTAAAKILLVPVLGVQRWQGVLGPYMLLVGTMLSGLVS NSWPQAILLPQPPKVLGL (SEQ ID NO:60 ). Moreover, fragments and variants of these polypeptides (such as, for example, fragments as described herein, polypeptides at least 80%, 85%, 90%, 95%, 96%, 97%, 98%, or 99% identical to these polypeptides and polypeptides encoded by nucleic acids which hybridize, under stringent conditions, to the polynucleotide encoding these polypeptides, or the complement thereof are encompassed by the invention. Polynucleotides encoding these polypeptides are also encompassed by the inventions.

[0080] This gene is expressed primarily in diabetic skeletal muscle.

[0081] Polynucleotides and polypeptides of the invention are useful as reagents for differential identification of the tissue(s) or cell type(s) present in a biological sample and for diagnosis of diseases and conditions which include but are not limited to: diabetes. Similarly, polypeptides and antibodies directed to these polypeptides are useful in providing immunological probes for differential identification of the tissue(s) or cell type(s). For a number of disorders of the above tissues or cells and/or those tissues indicated in Table 1B and Table 4 corresponding to this gene, particularly of the metabolic system, expression of this gene at significantly higher or lower levels may be routinely detected in certain tissues or cell types (e.g., cancerous and wounded tissues) or bodily fluids (e.g., serum, plasma, urine, synovial fluid and spinal fluid) or another tissue or sample taken from an individual having such a disorder, relative to the standard gene expression level, i.e., the expression level in healthy tissue or bodily fluid from an individual not having the disorder.

[0082] The tissue distribution indicates that polynucleotides and polypeptides corresponding to this gene are useful for detection, prevention, and/or treatment of diabetes (for example, types I and II diabetes), obesity, eating disorders including bulimia and anorexia, and muscular disorders. Elevated levels of expression in the prostate indicate a role in modulation of tumor progression.

Features of Protein Encoded by Gene No: 22

[0083] Polynucleotides and polypeptides of the invention are useful as reagents for differential identification of the tissue(s) or cell type(s) present in a biological sample and for diagnosis of diseases and conditions which include but are not limited to: disorders in digestive, reproductive, immune/hematopoietic, neural/sensory, musculoskeletal, excretory, endocrine, cardiovascular, connective/epithelial, and respiratory systems. Similarly, polypeptides and antibodies directed to these polypeptides are useful in providing immunological probes for differential identification of the tissue(s) or cell type(s). For a number of disorders of the above tissues or cells and/or those tissues indicated in Table 1B and Table 4 corresponding to this gene, particularly of the digestive, reproductive, immune/hematopoietic, neural/sensory systems, expression of this gene at significantly higher or lower levels may be routinely detected in certain tissues or cell types (e.g., cancerous and wounded tissues) or bodily fluids (e.g., serum, plasma, urine, synovial fluid and spinal fluid) or another tissue or sample taken from an individual having such a disorder, relative to the standard gene expression level, i.e., the expression level in healthy tissue or bodily fluid from an individual not having the disorder.

[0084] The tissue distribution indicates that polynucleotides and polypeptides corresponding to this gene are useful for detection, prevention, and/or treatment of diabetes (for example, types I and II diabetes), obesity, eating disorders including bulimia and anorexia, and muscular disorders. Elevated levels of expression in the prostate indicate a role in modulation of tumor progression.

Features of Protein Encoded by Gene No: 23

[0085] This gene is expressed primarily in skeletal muscle from normal and type II diabetic patients and to a lesser extent in prostate.

[0086] Polynucleotides and polypeptides of the invention are useful as reagents for differential identification of the tissue(s) or cell type(s) present in a biological sample and for diagnosis of diseases and conditions which include but are not limited to: diabetes. Similarly, polypeptides and antibodies directed to these polypeptides are useful in providing immunological probes for differential identification of the tissue(s) or cell type(s). For a number of disorders of the above tissues or cells and/or those tissues indicated in Table 1B and Table 4 corresponding to this gene, particularly of the metabolic system, expression of this gene at significantly higher or lower levels may be routinely detected in certain tissues or cell types (e.g., cancerous and wounded tissues) or bodily fluids (e.g., serum, plasma, urine, synovial fluid and spinal fluid) or another tissue or sample taken from an individual having such a disorder, relative to the standard gene expression level, i.e., the expression level in healthy tissue or bodily fluid from an individual not having the disorder.

[0087] The tissue distribution indicates that polynucleotides and polypeptides corresponding to this gene are useful for detection, prevention, and/or treatment of diabetes (for example, types I and II diabetes), obesity, eating disorders including bulimia and anorexia, and muscular disorders. Elevated levels of expression in the prostate indicate a role in modulation of tumor progression.

Features of Protein Encoded by Gene No: 64

[0088] This gene is expressed primarily in Soares fetal liver/spleen 1NFLS and Soares Infant Brain 1NIB and to a lesser extent in NCI_CGAP_Co8;NCI_CGAP_Brn23;Soares melanocyte 2NbHM;NCI_CGAP_GCB1;NCI_CGAP_Ut4;Human Colon Cancer;re-excision; NCI_CGAP_Ut2;Ovary, Cancer: (4004332 A2);Stratagene pancreas (#937208);Human Heart;NCI_CGAP_Pan1;Smooth muscle, serum treated;NCI_CGAP_Kid5;Human Microvascular Endothelial Cells, fract. A;Bone Marrow Cell Line (RS4;11);Hodgkin's Lymphoma II;Mo7e Cell Line GM-CSF treated (1 ng/ml);Soares placenta Nb2HP;Primary Dendritic Cells, lib 1;Barstead aorta HPLRB3;b4HB3MA Cot8-HAP-Ft;Normal Ovary, #9710G208;NCI_CGAP_GCB0;Human cell line from hepatocellular carinoma;liver;NCI_CGAP_Pr23;NCI_CGAP_Pr6;Human colon carcinoma (HCC) cell line, remake;Human Skin Tumor;Stromal cells 3.88;Lung Carcinoma A549 TNFalpha activated;Human adult (K.Okubo);NCI_CGAP_Co9;H Female Bladder, Adult;Synovial hypoxia-RSF subtracted;NCI_CGAP_Co10;Human Colon; re-excision; NCI_CGAP_Lym12;HEL cell line;Pancreatic cancer #14677A1L;Human Bone Marrow, re-excision;NCI_CGAP_Pr22;Adipose tissue (diabetic type II) #41661;Diabetic Liver 99-09-A281a;human ovarian cancer;Human Prostate Cancer, Stage B2; re-excision; Diabetic Skeletal Muscle #42483;NCI_CGAP_Br2;Spinal cord;Human Adipose;NCI_CGAP_Co3;Palate normal;Epithelial-TNFa and INF induced;Ovary, Cancer (9809C332): Poorly differentiated adenocarcinoma;Ovary, Cancer(4004650 A3): Well-Differeniated Micropapillary Serous Carcinoma;Bone marrow;12 Week Early Stage Human II; Reexcision;Anergic T-cell;Human Osteoclastoma;Human Amygdala;Monocyte activated;Prostate Adenocarcinoma;Soares_placenta_{—}8to9weeks_{—}2NbHP8to9W;HUMAN B CELL LYMPHOMA;Human Thymus Stromal Cells;Liver Tumour Met 5 Tu;Human Bone Marrow, treated;normalized infant brain cDNA;NTERA2 teratocarcinoma cell line+retinoic acid (14 days);T cell helper II;Soares_fetal_heart_NbHH19W;Soares_testis_NHT;HTB;HTC;NCI_CGAP_{—Skn}3;NCI_C GAP_Kid13.

[0089] Polynucleotides and polypeptides of the invention are useful as reagents for differential identification of the tissue(s) or cell type(s) present in a biological sample and for diagnosis of diseases and conditions which include but are not limited to: diabetes, obesity, and cancer and other hyperproliferative disorders. Similarly, polypeptides and antibodies directed to these polypeptides are useful in providing immunological probes for differential identification of the tissue(s) or cell type(s). For a number of disorders of the above tissues or cells, particularly of the glucose regulatory pathway, liver, spleen and brain, and fetal tissues, expression of this gene at significantly higher or lower levels may be routinely detected in certain tissues or cell types (e.g., cancerous and wounded tissues) or bodily fluids (e.g., serum, plasma, urine, synovial fluid and spinal fluid) or another tissue or sample taken from an individual having such a disorder, relative to the standard gene expression level, i.e., the expression level in healthy tissue or bodily fluid from an individual not having the disorder.

[0090] The tissue distribution (significant expression in fetal tissue and gene discovery in diabetes related tissue) indicates that polynucleotides and polypeptides corresponding to this gene are useful for diagnosis and treatment of diabetes and other disorders related to glucose control, and cancer and other hyperproliferative disorders.

Features of Protein Encoded by Gene No: 65

[0091] This gene is expressed primarily in human pituitary, subt IX, Soares Infant Brain 1NIB, and Soares fetal liver spleen 1NFLS, and Diabetic skeletal muscle and to a lesser extent in NCI_CGAP_Kid11;NCI_CGAP_GC6;Soares_NhHMPu_S1;Fetal Heart, re-excision; Human normal ovary(#9610G215);Human Colon; re-excision;NCI_CGAP_Ut1;H. Epididiymus, cauda;NCI_CGAP_Pr28;Spinal cord;Soares breast 3NbHBst;Human endometrial stromal cells-treated with progesterone;NCI_CGAP_Brn25;normalized infant brain cDNA;Soares melanocyte 2NbHM;Activated T-cell(12 h)/Thiouridine-re-excision; Soares_testis_NHT;Primary Dendritic Cells, lib 1;NCI_CGAP_Sub3;Human Cerebellum;Human Pituitary, subtracted VI;Human Pituitary, subtracted VII;Prostate;Prostate Adenocarcinoma cell line cultured in vivo in mice;Human Pituitary, subtracted;Adenocarcinoma of Ovary, Human Cell Line, #OVCAR-3;Human Neutrophils, Activated, re-excision;Human Thyroid;Human Normal Breast;NCI_CGAP_AA1;Apoptotic T-cell, re-excision;Human Epididymus;Human Soleus;Human adult (K.Okubo);Salivary Gland, Lib 2;wilm's tumor;Diabetic Skeletal Muscle #42352-L;NCI_CGAP_Pr22;Human Prostate Cancer, Stage C; re-excission;Human Umbilical Vein Endothelial Cells, uninduced;Macrophage-oxLDL;Stratagene endothelial cell 937223;Soares_NSF_F8_{—}9W_OT_PA_P_S1;Soares breast 2NbHBst;Epithelial-TNFa and INF induced;Human Gall Bladder;Smooth muscle, serum treated;Epithelial-TNFa and INF induced;B-cells (unstimulated);NTERA2, control;Human Fetal Heart;Activated T-Cell (12 hs)/Thiouridine labelledEco;B-cells (stimulated);Human Amygdala;NCI_CGAP_Kid3;Pancreas Islet Cell Tumor;NCI_CGAP_Lu5;Human Cerebellum;Soares_pregnant_uterus_NbHPU;Soares_fetal_liver_spleen_{—}1NFLS_S1;NCI_C GAP_HN6;NCI_CGAP_Skn4;NCI_CGAP_Sub4;NCI_CGAP_Brn50.

[0092] Polynucleotides and polypeptides of the invention are useful as reagents for differential identification of the tissue(s) or cell type(s) present in a biological sample and for diagnosis of diseases and conditions which include but are not limited to: Diabetes and other diseases related to glucose control. Similarly, polypeptides and antibodies directed to these polypeptides are useful in providing immunological probes for differential identification of the tissue(s) or cell type(s). For a number of disorders of the above tissues or cells, particularly of the brain and skeletal muscle, expression of this gene at significantly higher or lower levels may be routinely detected in certain tissues or cell types (e.g., cancerous and wounded tissues) or bodily fluids (e.g., serum, plasma, urine, synovial fluid and spinal fluid) or another tissue or sample taken from an individual having such a disorder, relative to the standard gene expression level, i.e., the expression level in healthy tissue or bodily fluid from an individual not having the disorder.

[0093] The tissue distribution in diabetic skeletal muscle and the endocrine system (pituitary) indicates that polynucleotides and polypeptides corresponding to this gene are useful for diagnosis and treatment of diabetes and other diseases related to the control of glucose.

Features of Protein Encoded by Gene No: 66

[0094] This gene is expressed primarily in breast, diabetic adipose and muscle tissues and to a lesser extent in ovarian tumors and pancreatic tissues .

[0095] Polynucleotides and polypeptides of the invention are useful as reagents for differential identification of the tissue(s) or cell type(s) present in a biological sample and for diagnosis of diseases and conditions which include but are not limited to: diabetes. Similarly, polypeptides and antibodies directed to these polypeptides are useful in providing immunological probes for differential identification of the tissue(s) or cell type(s). For a number of disorders of the above tissues or cells, particularly metabolic disorders, expression of this gene at significantly higher or lower levels may be routinely detected in certain tissues or cell types (e.g., cancerous and wounded tissues) or bodily fluids (e.g., serum, plasma, urine, synovial fluid and spinal fluid) or another tissue or sample taken from an individual having such a disorder, relative to the standard gene expression level, i.e., the expression level in healthy tissue or bodily fluid from an individual not having the disorder. Embodiments of the invention encompass using polynucleotides and polypeptides (including fragments and variants thereof, and also antibodies, agonists and antagonists thereof) to prevent, diagnose, treat, or ameliorate a disease or disorder. In preferred embodiments, the present invention encompasses a method of preventing, diagnosing, treating, or ameliorating a disease or disorder related to one, two, three, or more, of the cells, tissues, and organs where the polynucleotide and/or polypeptide is expressed (for example, as indicated in Column 8 of Table 1B) or as indicated in the “Preferred Indications” column of Table 1C; comprising administering to a patient in which such prevention, diagnosis, treatment, or amelioration is desired a protein, nucleic acid, or antibody of the invention (or fragment or variant thereof) represented by Table 1A and Table 1C (in the same row as the disease or disorder to be treated is listed in the “Preferred Indications” column of Table 1C) in an amount effective to prevent, diagnose, treat, or ameliorate the disease or disorder. In another embodiment, the present invention also encompasses methods of preventing, diagnosing, treating, or ameliorating a disease or disorder related to one, two, three, or more, of the cells, tissues, and organs where the polynucleotide and/or polypeptide is expressed (for example, as indicated in Column 8 of Table 1B) or as indicated in the “Preferred Indications” column of Table 1C; comprising administering to a patient diagonistic or therapeutic molecules in combination with proteins, nucleic acids, or antibodies of the invention (or fragments or variants thereof) as represented by Table 1A and Table 1C.

[0096] Polynucleotides and polypeptides corresponding to this gene are useful for the treatment and diagnosis of metabolic disorders in particular obescity and diabetes. In addition the elevated levels of this gene in ovarian cancer indicate a role in for this protein in modulating tumor progression in ovarian and other solid tumors

Features of Protein Encoded by Gene No: 67

[0097] This gene is expressed primarily in diabetic adipose tissue and to a lesser extent in smooth muscle and synovial tissues.

[0098] Polynucleotides and polypeptides of the invention are useful as reagents for differential identification of the tissue(s) or cell type(s) present in a biological sample and for diagnosis of diseases and conditions which include but are not limited to: diabetes. Similarly, polypeptides and antibodies directed to these polypeptides are useful in providing immunological probes for differential identification of the tissue(s) or cell type(s). For a number of disorders of the above tissues or cells, particularly metabolic disorders, expression of this gene at significantly higher or lower levels may be routinely detected in certain tissues or cell types (e.g., cancerous and wounded tissues) or bodily fluids (e.g., serum, plasma, urine, synovial fluid and spinal fluid) or another tissue or sample taken from an individual having such a disorder, relative to the standard gene expression level, i.e., the expression level in healthy tissue or bodily fluid from an individual not having the disorder. Embodiments of the invention encompass using polynucleotides and polypeptides (including fragments and variants thereof, and also antibodies, agonists and antagonists thereof) to prevent, diagnose, treat, or ameliorate a disease or disorder. In preferred embodiments, the present invention encompasses a method of preventing, diagnosing, treating, or ameliorating a disease or disorder related to one, two, three, or more, of the cells, tissues, and organs where the polynucleotide and/or polypeptide is expressed (for example, as indicated in Column 8 of Table 1B) or as indicated in the “Preferred Indications” column of Table 1C; comprising administering to a patient in which such prevention, diagnosis, treatment, or amelioration is desired a protein, nucleic acid, or antibody of the invention (or fragment or variant thereof) represented by Table 1A and Table 1C (in the same row as the disease or disorder to be treated is listed in the “Preferred Indications” column of Table 1C) in an amount effective to prevent, diagnose, treat, or ameliorate the disease or disorder. In another embodiment, the present invention also encompasses methods of preventing, diagnosing, treating, or ameliorating a disease or disorder related to one, two, three, or more, of the cells, tissues, and organs where the polynucleotide and/or polypeptide is expressed (for example, as indicated in Column 8 of Table 1B) or as indicated in the “Preferred Indications” column of Table 1C; comprising administering to a patient diagonistic or therapeutic molecules in combination with proteins, nucleic acids, or antibodies of the invention (or fragments or variants thereof) as represented by Table 1A and Table 1C.

[0099] The tissue distribution indicates that polynucleotides and polypeptides corresponding to this gene are useful for treatment and diagnosis of diabetes, obesity or metabolic disorders. In addition the elevated levels of expression in smooth muscle and synovial tissue indicates roles in hypertension, atherosclerosis and tissue inflammation respectively.

Features of Protein Encoded by Gene No: 68

[0100] This gene is expressed primarily in pancreatic cancer and to a lesser extent in testis.

[0101] Polynucleotides and polypeptides of the invention are useful as reagents for differential identification of the tissue(s) or cell type(s) present in a biological sample and for diagnosis of diseases and conditions which include but are not limited to: diabetes, pancreatic cancer. Similarly, polypeptides and antibodies directed to these polypeptides are useful in providing immunological probes for differential identification of the tissue(s) or cell type(s). For a number of disorders of the above tissues or cells, particularly of the endocrine system, expression of this gene at significantly higher or lower levels may be routinely detected in certain tissues or cell types (e.g., cancerous and wounded tissues) or bodily fluids (e.g., serum, plasma, urine, synovial fluid and spinal fluid) or another tissue or sample taken from an individual having such a disorder, relative to the standard gene expression level, i.e., the expression level in healthy tissue or bodily fluid from an individual not having the disorder. Embodiments of the invention encompass using polynucleotides and polypeptides (including fragments and variants thereof, and also antibodies, agonists and antagonists thereof) to prevent, diagnose, treat, or ameliorate a disease or disorder. In preferred embodiments, the present invention encompasses a method of preventing, diagnosing, treating, or ameliorating a disease or disorder related to one, two, three, or more, of the cells, tissues, and organs where the polynucleotide and/or polypeptide is expressed (for example, as indicated in Column 8 of Table 1B) or as indicated in the “Preferred Indications” column of Table 1C; comprising administering to a patient in which such prevention, diagnosis, treatment, or amelioration is desired a protein, nucleic acid, or antibody of the invention (or fragment or variant thereof) represented by Table 1A and Table 1C (in the same row as the disease or disorder to be treated is listed in the “Preferred Indications” column of Table 1C) in an amount effective to prevent, diagnose, treat, or ameliorate the disease or disorder. In another embodiment, the present invention also encompasses methods of preventing, diagnosing, treating, or ameliorating a disease or disorder related to one, two, three, or more, of the cells, tissues, and organs where the polynucleotide and/or polypeptide is expressed (for example, as indicated in Column 8 of Table 1B) or as indicated in the “Preferred Indications” column of Table 1C; comprising administering to a patient diagonistic or therapeutic molecules in combination with proteins, nucleic acids, or antibodies of the invention (or fragments or variants thereof) as represented by Table 1A and Table 1C.

[0102] The tissue distribution indicates that polynucleotides and polypeptides corresponding to this gene are useful for treatment and diagnosis of tumor progression, in particular adenocarcinomas of the pancreas and other solid tumors.

Features of Protein Encoded by Gene No: 69

[0103] This gene is expressed primarily in pancreas.

[0104] Polynucleotides and polypeptides of the invention are useful as reagents for differential identification of the tissue(s) or cell type(s) present in a biological sample and for diagnosis of diseases and conditions which include but are not limited to pancreatic disorders (for example: diabetes, pancreatitis, pancreatic cancer). Similarly, polypeptides and antibodies directed to these polypeptides are useful in providing immunological probes for differential identification of the tissue(s) or cell type(s). For a number of disorders of the above tissues or cells, particularly of the pancreatic, expression of this gene at significantly higher or lower levels may be routinely detected in certain tissues or cell types (e.g., cancerous and wounded tissues) or bodily fluids (e.g., serum, plasma, urine, synovial fluid and spinal fluid) or another tissue or sample taken from an individual having such a disorder, relative to the standard gene expression level, i.e., the expression level in healthy tissue or bodily fluid from an individual not having the disorder. Embodiments of the invention encompass using polynucleotides and polypeptides (including fragments and variants thereof, and also antibodies, agonists and antagonists thereof) to prevent, diagnose, treat, or ameliorate a disease or disorder. In preferred embodiments, the present invention encompasses a method of preventing, diagnosing, treating, or ameliorating a disease or disorder related to one, two, three, or more, of the cells, tissues, and organs where the polynucleotide and/or polypeptide is expressed (for example, as indicated in Column 8 of Table 1B) or as indicated in the “Preferred Indications” column of Table 1C; comprising administering to a patient in which such prevention, diagnosis, treatment, or amelioration is desired a protein, nucleic acid, or antibody of the invention (or fragment or variant thereof) represented by Table 1A and Table 1C (in the same row as the disease or disorder to be treated is listed in the “Preferred Indications” column of Table 1C) in an amount effective to prevent, diagnose, treat, or ameliorate the disease or disorder. In another embodiment, the present invention also encompasses methods of preventing, diagnosing, treating, or ameliorating a disease or disorder related to one, two, three, or more, of the cells, tissues, and organs where the polynucleotide and/or polypeptide is expressed (for example, as indicated in Column 8 of Table 1B) or as indicated in the “Preferred Indications” column of Table 1C; comprising administering to a patient diagonistic or therapeutic molecules in combination with proteins, nucleic acids, or antibodies of the invention (or fragments or variants thereof) as represented by Table 1A and Table 1C.

[0105] The tissue distribution indicates that polynucleotides and polypeptides corresponding to this gene are useful for treatment and diagnosis in pancreatic disorders

Features of Protein Encoded by Gene No: 70

[0106] The translation product of this gene shares sequence homology with a human smooth muscle cell associated protein-1(SMAP-1) which is thought to be important in stimulating stroma-supported erythropoiesis.

[0107] This gene is expressed primarily in cardiovascular, musculoskeletal, mixed fetal tissues and to a lesser extent in digestive tissue(s).

[0108] Polynucleotides and polypeptides of the invention are useful as reagents for differential identification of the tissue(s) or cell type(s) present in a biological sample and for diagnosis of diseases and conditions which include but are not limited to: diabetes, disorders in cardiovascular, musculoskeletal and immune/hematopoietic systems. Similarly, polypeptides and antibodies directed to these polypeptides are useful in providing immunological probes for differential identification of the tissue(s) or cell type(s). For a number of disorders of the above tissues or cells, particularly of the cardiovascular, musculoskeletal and immune/hematopoietic, expression of this gene at significantly higher or lower levels may be routinely detected in certain tissues or cell types (e.g., cancerous and wounded tissues) or bodily fluids (e.g., serum, plasma, urine, synovial fluid and spinal fluid) or another tissue or sample taken from an individual having such a disorder, relative to the standard gene expression level, i.e., the expression level in healthy tissue or bodily fluid from an individual not having the disorder. Embodiments of the invention encompass using polynucleotides and polypeptides (including fragments and variants thereof, and also antibodies, agonists and antagonists thereof) to prevent, diagnose, treat, or ameliorate a disease or disorder. In preferred embodiments, the present invention encompasses a method of preventing, diagnosing, treating, or ameliorating a disease or disorder related to one, two, three, or more, of the cells, tissues, and organs where the polynucleotide and/or polypeptide is expressed (for example, as indicated in Column 8 of Table 1B) or as indicated in the “Preferred Indications” column of Table 1C; comprising administering to a patient in which such prevention, diagnosis, treatment, or amelioration is desired a protein, nucleic acid, or antibody of the invention (or fragment or variant thereof) represented by Table 1A and Table 1C (in the same row as the disease or disorder to be treated is listed in the “Preferred Indications” column of Table 1C) in an amount effective to prevent, diagnose, treat, or ameliorate the disease or disorder. In another embodiment, the present invention also encompasses methods of preventing, diagnosing, treating, or ameliorating a disease or disorder related to one, two, three, or more, of the cells, tissues, and organs where the polynucleotide and/or polypeptide is expressed (for example, as indicated in Column 8 of Table 1B) or as indicated in the “Preferred Indications” column of Table 1C; comprising administering to a patient diagonistic or therapeutic molecules in combination with proteins, nucleic acids, or antibodies of the invention (or fragments or variants thereof) as represented by Table 1A and Table 1C.

[0109] The tissue distribution and homology to a human smooth muscle cell associated protein-1(SMAP-1) indicates that polynucleotides and polypeptides corresponding to this gene are useful for treatment and diagnosis of disorders in cardiovascular, musculoskeletal and immune/hematopoietic systems.

Features of Protein Encoded by Gene No: 71

[0110] The translation product of this gene shares sequence homology with a human lysosomal membrane sialoglycoprotein (hLGP85) from a human pancreatic islet tumor cell with a high metastatic activity.

[0111] This gene is expressed primarily in reproductive, immune/hematopoietic, digestive, musculoskeletal, and neural/sensory tissues and to a lesser extent in respiratory, excretory, mixed fetal, and endocrine tissue(s).

[0112] Polynucleotides and polypeptides of the invention are useful as reagents for differential identification of the tissue(s) or cell type(s) present in a biological sample and for diagnosis of diseases and conditions which include but are not limited to: diabetes, disorders in reproductive, immune/hematopoietic, digestive, musculoskeletal, and neural/sensory systems. Similarly, polypeptides and antibodies directed to these polypeptides are useful in providing immunological probes for differential identification of the tissue(s) or cell type(s). For a number of disorders of the above tissues or cells, particularly of the reproductive, immune/hematopoietic, digestive, musculoskeletal, and neural/sensory, expression of this gene at significantly higher or lower levels may be routinely detected in certain tissues or cell types (e.g., cancerous and wounded tissues) or bodily fluids (e.g., serum, plasma, urine, synovial fluid and spinal fluid) or another tissue or sample taken from an individual having such a disorder, relative to the standard gene expression level, i.e., the expression level in healthy tissue or bodily fluid from an individual not having the disorder. Embodiments of the invention encompass using polynucleotides and polypeptides (including fragments and variants thereof, and also antibodies, agonists and antagonists thereof) to prevent, diagnose, treat, or ameliorate a disease or disorder. In preferred embodiments, the present invention encompasses a method of preventing, diagnosing, treating, or ameliorating a disease or disorder related to one, two, three, or more, of the cells, tissues, and organs where the polynucleotide and/or polypeptide is expressed (for example, as indicated in Column 8 of Table 1B) or as indicated in the “Preferred Indications” column of Table 1C; comprising administering to a patient in which such prevention, diagnosis, treatment, or amelioration is desired a protein, nucleic acid, or antibody of the invention (or fragment or variant thereof) represented by Table 1A and Table 1C (in the same row as the disease or disorder to be treated is listed in the “Preferred Indications” column of Table 1C) in an amount effective to prevent, diagnose, treat, or ameliorate the disease or disorder. In another embodiment, the present invention also encompasses methods of preventing, diagnosing, treating, or ameliorating a disease or disorder related to one, two, three, or more, of the cells, tissues, and organs where the polynucleotide and/or polypeptide is expressed (for example, as indicated in Column 8 of Table 1B) or as indicated in the “Preferred Indications” column of Table 1C; comprising administering to a patient diagonistic or therapeutic molecules in combination with proteins, nucleic acids, or antibodies of the invention (or fragments or variants thereof) as represented by Table 1A and Table 1C.

[0113] The tissue distribution and homology to a human lysosomal membrane sialoglycoprotein (hLGP85) indicates that polynucleotides and polypeptides corresponding to this gene are useful for treatment and diagnosis of disorders in reproductive, immune/hematopoietic, digestive, musculoskeletal, and neural/sensory systems.

Features of Protein Encoded by Gene No: 72

[0114] This gene is expressed primarily in neural, reproductive and haemopoietic tissues and to a lesser extent in several other tissues and cell types including cancer.

[0115] Polynucleotides and polypeptides of the invention are useful as reagents for differential identification of the tissue(s) or cell type(s) present in a biological sample and for diagnosis of diseases and conditions which include but are not limited to: diabetes, diseases of the neural, reproductive and haemopoietic systems including cancers. Similarly, polypeptides and antibodies directed to these polypeptides are useful in providing immunological probes for differential identification of the tissue(s) or cell type(s). For a number of disorders of the above tissues or cells, particularly diseases of the neural, reproductive and haemopoietic systems including cancers, expression of this gene at significantly higher or lower levels may be routinely detected in certain tissues or cell types (e.g., cancerous and wounded tissues) or bodily fluids (e.g., serum, plasma, urine, synovial fluid and spinal fluid) or another tissue or sample taken from an individual having such a disorder, relative to the standard gene expression level, i.e., the expression level in healthy tissue or bodily fluid from an individual not having the disorder. Embodiments of the invention encompass using polynucleotides and polypeptides (including fragments and variants thereof, and also antibodies, agonists and antagonists thereof) to prevent, diagnose, treat, or ameliorate a disease or disorder. In preferred embodiments, the present invention encompasses a method of preventing, diagnosing, treating, or ameliorating a disease or disorder related to one, two, three, or more, of the cells, tissues, and organs where the polynucleotide and/or polypeptide is expressed (for example, as indicated in Column 8 of Table 1B) or as indicated in the “Preferred Indications” column of Table 1C; comprising administering to a patient in which such prevention, diagnosis, treatment, or amelioration is desired a protein, nucleic acid, or antibody of the invention (or fragment or variant thereof) represented by Table 1A and Table 1C (in the same row as the disease or disorder to be treated is listed in the “Preferred Indications” column of Table 1C) in an amount effective to prevent, diagnose, treat, or ameliorate the disease or disorder. In another embodiment, the present invention also encompasses methods of preventing, diagnosing, treating, or ameliorating a disease or disorder related to one, two, three, or more, of the cells, tissues, and organs where the polynucleotide and/or polypeptide is expressed (for example, as indicated in Column 8 of Table 1B) or as indicated in the “Preferred Indications” column of Table 1C; comprising administering to a patient diagonistic or therapeutic molecules in combination with proteins, nucleic acids, or antibodies of the invention (or fragments or variants thereof) as represented by Table 1A and Table 1C.

[0116] The tissue distribution indicates that polynucleotides and polypeptides corresponding to this gene are useful for diagnosis and treatment of disorders of the neural, reproductive and haemopoietic systems including cancers.

Features of Protein Encoded by Gene No: 73

[0117] This gene is expressed primarily in pancreatic tissue.

[0118] Polynucleotides and polypeptides of the invention are useful as reagents for differential identification of the tissue(s) or cell type(s) present in a biological sample and for diagnosis of diseases and conditions which include but are not limited to: metabolic disease including diabetes and endocrine disorders. Similarly, polypeptides and antibodies directed to these polypeptides are useful in providing immunological probes for differential identification of the tissue(s) or cell type(s). For a number of disorders of the above tissues or cells, particularly of the metabolic and endocrine systems, expression of this gene at significantly higher or lower levels may be routinely detected in certain tissues or cell types (e.g., cancerous and wounded tissues) or bodily fluids (e.g., serum, plasma, urine, synovial fluid and spinal fluid) or another tissue or sample taken from an individual having such a disorder, relative to the standard gene expression level, i.e., the expression level in healthy tissue or bodily fluid from an individual not having the disorder. Embodiments of the invention encompass using polynucleotides and polypeptides (including fragments and variants thereof, and also antibodies, agonists and antagonists thereof) to prevent, diagnose, treat, or ameliorate a disease or disorder. In preferred embodiments, the present invention encompasses a method of preventing, diagnosing, treating, or ameliorating a disease or disorder related to one, two, three, or more, of the cells, tissues, and organs where the polynucleotide and/or polypeptide is expressed (for example, as indicated in Column 8 of Table 1B) or as indicated in the “Preferred Indications” column of Table 1C; comprising administering to a patient in which such prevention, diagnosis, treatment, or amelioration is desired a protein, nucleic acid, or antibody of the invention (or fragment or variant thereof) represented by Table 1A and Table 1C (in the same row as the disease or disorder to be treated is listed in the “Preferred Indications” column of Table 1C) in an amount effective to prevent, diagnose, treat, or ameliorate the disease or disorder. In another embodiment, the present invention also encompasses methods of preventing, diagnosing, treating, or ameliorating a disease or disorder related to one, two, three, or more, of the cells, tissues, and organs where the polynucleotide and/or polypeptide is expressed (for example, as indicated in Column 8 of Table 1B) or as indicated in the “Preferred Indications” column of Table 1C; comprising administering to a patient diagonistic or therapeutic molecules in combination with proteins, nucleic acids, or antibodies of the invention (or fragments or variants thereof) as represented by Table 1A and Table 1C.

[0119] The tissue distribution indicates that polynucleotides and polypeptides corresponding to this gene are useful for treatment and diagnosis of disorders of the endocrine and metabolic systems including diabetes.

Features of Protein Encoded by Gene No: 74

[0120] This gene is expressed primarily in pancreatic tissues.

[0121] Polynucleotides and polypeptides of the invention are useful as reagents for differential identification of the tissue(s) or cell type(s) present in a biological sample and for diagnosis of diseases and conditions which include but are not limited to: diabetes and other metabolic or endocrine disorders. Similarly, polypeptides and antibodies directed to these polypeptides are useful in providing immunological probes for differential identification of the tissue(s) or cell type(s). For a number of disorders of the above tissues or cells, particularly of the endocrine and metabolic systems, expression of this gene at significantly higher or lower levels may be routinely detected in certain tissues or cell types (e.g., cancerous and wounded tissues) or bodily fluids (e.g., serum, plasma, urine, synovial fluid and spinal fluid) or another tissue or sample taken from an individual having such a disorder, relative to the standard gene expression level, i.e., the expression level in healthy tissue or bodily fluid from an individual not having the disorder. Embodiments of the invention encompass using polynucleotides and polypeptides (including fragments and variants thereof, and also antibodies, agonists and antagonists thereof) to prevent, diagnose, treat, or ameliorate a disease or disorder. In preferred embodiments, the present invention encompasses a method of preventing, diagnosing, treating, or ameliorating a disease or disorder related to one, two, three, or more, of the cells, tissues, and organs where the polynucleotide and/or polypeptide is expressed (for example, as indicated in Column 8 of Table 1B) or as indicated in the “Preferred Indications” column of Table 1C; comprising administering to a patient in which such prevention, diagnosis, treatment, or amelioration is desired a protein, nucleic acid, or antibody of the invention (or fragment or variant thereof) represented by Table 1A and Table 1C (in the same row as the disease or disorder to be treated is listed in the “Preferred Indications” column of Table 1C) in an amount effective to prevent, diagnose, treat, or ameliorate the disease or disorder. In another embodiment, the present invention also encompasses methods of preventing, diagnosing, treating, or ameliorating a disease or disorder related to one, two, three, or more, of the cells, tissues, and organs where the polynucleotide and/or polypeptide is expressed (for example, as indicated in Column 8 of Table 1B) or as indicated in the “Preferred Indications” column of Table 1C; comprising administering to a patient diagonistic or therapeutic molecules in combination with proteins, nucleic acids, or antibodies of the invention (or fragments or variants thereof) as represented by Table 1A and Table 1C.

[0122] The tissue distribution indicates that polynucleotides and polypeptides corresponding to this gene are useful for treatment and diagnosis of diseases of the metabolic and endocrine systems including diabetes.

Features of Protein Encoded by Gene NO: 75

[0123] The translation product of this gene shares sequence homology with a human putative lymphocyte G0/G1 switch gene which is thought to be important in switch of lymphocytes from the G0 to the G1 phases of the cell cycle. It is also speculated as a potentail oncogene and regulator of latent HIV.

[0124] This gene is expressed primarily in immune/hematopoietic, musculoskeletal, digestive, and reproductive tissues and to a lesser extent in respiratory, mixed fetal, neural/sensory, excretory, connective/epithelial, and endocrine tissue(s).

[0125] Polynucleotides and polypeptides of the invention are useful as reagents for differential identification of the tissue(s) or cell type(s) present in a biological sample and for diagnosis of diseases and conditions which include but are not limited to: diabetes, disorders in immune/hematopoietic, musculoskeletal, digestive, and reproductive systems. Similarly, polypeptides and antibodies directed to these polypeptides are useful in providing immunological probes for differential identification of the tissue(s) or cell type(s). For a number of disorders of the above tissues or cells, particularly of the immune/hematopoietic, musculoskeletal, digestive, and reproductive, expression of this gene at significantly higher or lower levels may be routinely detected in certain tissues or cell types (e.g., cancerous and wounded tissues) or bodily fluids (e.g., serum, plasma, urine, synovial fluid and spinal fluid) or another tissue or sample taken from an individual having such a disorder, relative to the standard gene expression level, i.e., the expression level in healthy tissue or bodily fluid from an individual not having the disorder. Embodiments of the invention encompass using polynucleotides and polypeptides (including fragments and variants thereof, and also antibodies, agonists and antagonists thereof) to prevent, diagnose, treat, or ameliorate a disease or disorder. In preferred embodiments, the present invention encompasses a method of preventing, diagnosing, treating, or ameliorating a disease or disorder related to one, two, three, or more, of the cells, tissues, and organs where the polynucleotide and/or polypeptide is expressed (for example, as indicated in Column 8 of Table 1B) or as indicated in the “Preferred Indications” column of Table 1C; comprising administering to a patient in which such prevention, diagnosis, treatment, or amelioration is desired a protein, nucleic acid, or antibody of the invention (or fragment or variant thereof) represented by Table 1A and Table 1C (in the same row as the disease or disorder to be treated is listed in the “Preferred Indications” column of Table 1C) in an amount effective to prevent, diagnose, treat, or ameliorate the disease or disorder. In another embodiment, the present invention also encompasses methods of preventing, diagnosing, treating, or ameliorating a disease or disorder related to one, two, three, or more, of the cells, tissues, and organs where the polynucleotide and/or polypeptide is expressed (for example, as indicated in Column 8 of Table 1B) or as indicated in the “Preferred Indications” column of Table 1C; comprising administering to a patient diagonistic or therapeutic molecules in combination with proteins, nucleic acids, or antibodies of the invention (or fragments or variants thereof) as represented by Table 1A and Table 1C.

[0126] The tissue distribution and homology to a human putative lymphocyte G0/G1 switch gene indicates that polynucleotides and polypeptides corresponding to this gene are useful for treatment and diagnosis of disorders in immune/hematopoietic, musculoskeletal, digestive, and reproductive tissues systems.

Features of Protein Encoded by Gene No: 76

[0127] This gene is expressed primarily in Pancreas normal PCA4 No;Pancreas Tumor PCA4 Tu;Pancreatic Cancer #0009A186;normal pancreas—sample number 42218.

[0128] Polynucleotides and polypeptides of the invention are useful as reagents for differential identification of the tissue(s) or cell type(s) present in a biological sample and for diagnosis of diseases and conditions which include but are not limited to: diabetes, Pancreatic Cancer. Similarly, polypeptides and antibodies directed to these polypeptides are useful in providing immunological probes for differential identification of the tissue(s) or cell type(s). For a number of disorders of the above tissues or cells, particularly of the immune and gigestive systems, expression of this gene at significantly higher or lower levels may be routinely detected in certain tissues or cell types (e.g., cancerous and wounded tissues) or bodily fluids (e.g., serum, plasma, urine, synovial fluid and spinal fluid) or another tissue or sample taken from an individual having such a disorder, relative to the standard gene expression level, i.e., the expression level in healthy tissue or bodily fluid from an individual not having the disorder. Embodiments of the invention encompass using polynucleotides and polypeptides (including fragments and variants thereof, and also antibodies, agonists and antagonists thereof) to prevent, diagnose, treat, or ameliorate a disease or disorder. In preferred embodiments, the present invention encompasses a method of preventing, diagnosing, treating, or ameliorating a disease or disorder related to one, two, three, or more, of the cells, tissues, and organs where the polynucleotide and/or polypeptide is expressed (for example, as indicated in Column 8 of Table 1B) or as indicated in the “Preferred Indications” column of Table 1C; comprising administering to a patient in which such prevention, diagnosis, treatment, or amelioration is desired a protein, nucleic acid, or antibody of the invention (or fragment or variant thereof) represented by Table 1A and Table 1C (in the same row as the disease or disorder to be treated is listed in the “Preferred Indications” column of Table 1C) in an amount effective to prevent, diagnose, treat, or ameliorate the disease or disorder. In another embodiment, the present invention also encompasses methods of preventing, diagnosing, treating, or ameliorating a disease or disorder related to one, two, three, or more, of the cells, tissues, and organs where the polynucleotide and/or polypeptide is expressed (for example, as indicated in Column 8 of Table 1B) or as indicated in the “Preferred Indications” column of Table 1C; comprising administering to a patient diagonistic or therapeutic molecules in combination with proteins, nucleic acids, or antibodies of the invention (or fragments or variants thereof) as represented by Table 1A and Table 1C. The tissue distribution indicates that polynucleotides and polypeptides corresponding to this gene are useful for Pancreatic Cancer.

Features of Protein Encoded by Gene No: 77

[0129] The translation product of this gene shares sequence homology with SDF-1 (stromal cell-derived factor 1 precursor, also called pre-B-cell-stimulating factor) which may be implicated in the aggressiveness of the autoimmune process leading to type 1 diabetes. Also, overexpression of SDF-1 and aberrant HIV-1 expression in circulating lymphocytes appear to be linked to the development of AIDS-lymphoma.

[0130] This gene is expressed primarily in reproductive, neural/sensory, musculoskeletal, immune/hematopoietic, and digestive tissues and to a lesser extent in connective/epithelial, endocrine, cardiovascular, mixed fetal, and excretory tissues.

[0131] Polynucleotides and polypeptides of the invention are useful as reagents for differential identification of the tissue(s) or cell type(s) present in a biological sample and for diagnosis of diseases and conditions which include but are not limited to: diabetes, disorders in reproductive, neural/sensory, musculoskeletal, immune/hematopoietic, digestive, connective/epithelial, endocrine, cardiovascular, mixed fetal, and excretory systems. Similarly, polypeptides and antibodies directed to these polypeptides are useful in providing immunological probes for differential identification of the tissue(s) or cell type(s). For a number of disorders of the above tissues or cells, particularly of the reproductive, neural/sensory, musculoskeletal, immune/hematopoietic, digestive, connective/epithelial, endocrine, cardiovascular, mixed fetal, and excretory systems, expression of this gene at significantly higher or lower levels may be routinely detected in certain tissues or cell types (e.g., cancerous and wounded tissues) or bodily fluids (e.g., serum, plasma, urine, synovial fluid and spinal fluid) or another tissue or sample taken from an individual having such a disorder, relative to the standard gene expression level, i.e., the expression level in healthy tissue or bodily fluid from an individual not having the disorder. Embodiments of the invention encompass using polynucleotides and polypeptides (including fragments and variants thereof, and also antibodies, agonists and antagonists thereof) to prevent, diagnose, treat, or ameliorate a disease or disorder. In preferred embodiments, the present invention encompasses a method of preventing, diagnosing, treating, or ameliorating a disease or disorder related to one, two, three, or more, of the cells, tissues, and organs where the polynucleotide and/or polypeptide is expressed (for example, as indicated in Column 8 of Table 1B) or as indicated in the “Preferred Indications” column of Table 1C; comprising administering to a patient in which such prevention, diagnosis, treatment, or amelioration is desired a protein, nucleic acid, or antibody of the invention (or fragment or variant thereof) represented by Table 1A and Table 1C (in the same row as the disease or disorder to be treated is listed in the “Preferred Indications” column of Table 1C) in an amount effective to prevent, diagnose, treat, or ameliorate the disease or disorder. In another embodiment, the present invention also encompasses methods of preventing, diagnosing, treating, or ameliorating a disease or disorder related to one, two, three, or more, of the cells, tissues, and organs where the polynucleotide and/or polypeptide is expressed (for example, as indicated in Column 8 of Table 1B) or as indicated in the “Preferred Indications” column of Table 1C; comprising administering to a patient diagonistic or therapeutic molecules in combination with proteins, nucleic acids, or antibodies of the invention (or fragments or variants thereof) as represented by Table 1A and Table 1C.

[0132] The tissue distribution and homology to SDF-1 indicates that polynucleotides and polypeptides corresponding to this gene are useful for treatment and/or diagnosis of disorders in reproductive, neural/sensory, musculoskeletal, immune/hematopoietic, digestive, connective/epithelial, endocrine, cardiovascular, mixed fetal, and excretory systems.

Features of Protein Encoded by Gene No: 78

[0133] The translation product of this gene shares sequence homology with Transmembrane 9 superfamily protein member 2, an integral membrane protein (with 9 spanning domains) of unknown function, although it is speculated to be a channel or transporter.

[0134] This gene is expressed primarily in Cancer Pancreas #14677A1L and Human umbilical vein endothelial cells, IL-4 induced. The closest match to this gene is known to be highly abudant and pancreas and kidney.

[0135] Polynucleotides and polypeptides of the invention are useful as reagents for differential identification of the tissue(s) or cell type(s) present in a biological sample and for diagnosis of diseases and conditions which include but are not limited to: diabetes, and other disorders related to improper glucose regulation, and pancreatic cancer. Similarly, polypeptides and antibodies directed to these polypeptides are useful in providing immunological probes for differential identification of the tissue(s) or cell type(s). For a number of disorders of the above tissues or cells, particularly of the pancreas and umbilical vein, expression of this gene at significantly higher or lower levels may be routinely detected in certain tissues or cell types (e.g., cancerous and wounded tissues) or bodily fluids (e.g., serum, plasma, urine, synovial fluid and spinal fluid) or another tissue or sample taken from an individual having such a disorder, relative to the standard gene expression level, i.e., the expression level in healthy tissue or bodily fluid from an individual not having the disorder. The tissue distribution indicates that polynucleotides and polypeptides corresponding to this gene are useful for diagnosis and treatment of diabetes and other disorders related to improper glucose control, and diagnosis and treatment of cancer and other hyperproliferative disorders, particularly pancreatic cancer.

Features of Protein Encoded by Gene No: 79

[0136] The translation product of this gene shares sequence homology with ribonuclease K6 precurson (EC 3.1.27.) which is thought to be important in host defense.

[0137] This gene is expressed primarily in primary dendritic cells and osteoclastoma and to a lesser extent in NCI_CGAP_Brn23;Soares placenta Nb2HP;Soares_NhHMPu_S1;Primary Dendritic cells,frac 2;Soares_fetal_liver_spleen_{—}1NFLS_S1;NCI_CGAP_GCB1;Soares fetal liver spleen 1NFLS;Human Osteoclastoma, re-excision;H Macrophage (GM-CSF treated), re-excision; Human Pancreas Tumor; Reexcision;Normal colon;NCI_CGAP_GC6;Soares_multiple_sclerosis_{—}2NbHMSP;Osteoclastoma;NCI_CGAP_Ov35;Human aorta polyA+ (TFujiwara);Patient #6 Acute Myeloid Leukemia/SGAH;Brain Frontal Cortex, re-excision;Pancreatic cancer #14677A1L;NCI_CGAP_Ut1;human ovarian cancer;CD40 activated monocyte dendridic cells;Ulcerative Colitis;Macrophage (GM-CSF treated);Human Liver, normal;Fetal Liver, subtraction II;Human T-Cell Lymphoma;NCI_CGAP_GC4;Colon Carcinoma;B-cells (unstimulated);Human Placenta;Soares_placenta_{—}8to9weeks_{—}2NbHP8to9W;Spleen, Chronic lymphocytic leukemia;Soares ovary tumor NbHOT;Human Bone Marrow, treated;Dendritic cells, pooled;Colon Tumor II;Soares_total_fetus_Nb2HF8_{—}9w;Colon Normal III;Soares_NFL_T_GBC_S1;NCI_CGAP_Sub3

[0138] Polynucleotides and polypeptides of the invention are useful as reagents for differential identification of the tissue(s) or cell type(s) present in a biological sample and for diagnosis of diseases and conditions which include but are not limited to: diabetes, infectious disease, and cancer and other proliferative disorders, particularly of immune/hematapoetic cells and bone. Similarly, polypeptides and antibodies directed to these polypeptides are useful in providing immunological probes for differential identification of the tissue(s) or cell type(s). For a number of disorders of the above tissues or cells, particularly of the glucose control system, immune and hematopoetic cells, and bone tissue, expression of this gene at significantly higher or lower levels may be routinely detected in certain tissues or cell types (e.g., cancerous and wounded tissues) or bodily fluids (e.g., serum, plasma, urine, synovial fluid and spinal fluid) or another tissue or sample taken from an individual having such a disorder, relative to the standard gene expression level, i.e., the expression level in healthy tissue or bodily fluid from an individual not having the disorder. Embodiments of the invention encompass using polynucleotides and polypeptides (including fragments and variants thereof, and also antibodies, agonists and antagonists thereof) to prevent, diagnose, treat, or ameliorate a disease or disorder. In preferred embodiments, the present invention encompasses a method of preventing, diagnosing, treating, or ameliorating a disease or disorder related to one, two, three, or more, of the cells, tissues, and organs where the polynucleotide and/or polypeptide is expressed (for example, as indicated in Column 8 of Table 1B) or as indicated in the “Preferred Indications” column of Table 1C; comprising administering to a patient in which such prevention, diagnosis, treatment, or amelioration is desired a protein, nucleic acid, or antibody of the invention (or fragment or variant thereof) represented by Table 1A and Table 1C (in the same row as the disease or disorder to be treated is listed in the “Preferred Indications” column of Table IC) in an amount effective to prevent, diagnose, treat, or ameliorate the disease or disorder. In another embodiment, the present invention also encompasses methods of preventing, diagnosing, treating, or ameliorating a disease or disorder related to one, two, three, or more, of the cells, tissues, and organs where the polynucleotide and/or polypeptide is expressed (for example, as indicated in Column 8 of Table 1B) or as indicated in the “Preferred Indications” column of Table 1C; comprising administering to a patient diagonistic or therapeutic molecules in combination with proteins, nucleic acids, or antibodies of the invention (or fragments or variants thereof) as represented by Table 1A and Table 1C.

[0139] The tissue distribution and homology to Ribonuclease K6 indicates that polynucleotides and polypeptides corresponding to this gene are useful for diagnosis and treatment of diabetes, and disorders related to diabetes. In addition, the probable association of ribonuclease K6 with infectious disease defense suggests a role for this gene in that process.

Features of Protein Encoded by Gene No: 80

[0140] The translation product of this gene shares sequence homology with ephrin-A1, one of three genes that encode the eph-related tyrosine kinase ligands which is thought to be important in apoptosis, as the expression of this gene is known to be induced by TNF alpha. This protein is known to be anchored to the cell membrane.

[0141] This gene is expressed primarily in human endometrial tumor and Soares HhHMPu S1 (pooled melanocyte, fetal heart, and pregnant uterus), rectal tumor, pancreatic adenocarcinoma, and Soares fetal liver/spleen, and to a lesser extent in Soares_fetal_heart_NbHH19W;Liver Tumour Met 5 Tu;Colon Normal;NCI_CGAP_Ut1;NCI_CGAP_Pr28;Soares breast 3NbHBst;Colon, normal;NCI_CGAP_Ut3;Human Prostate;NCI_CGAP_Pr1;NCI_CGAP_Kid3;NCI_CGAP_Kid5;Human Adult Heart;re-excision; Soares_placenta_{—}8to9weeks_{—}2NbHP8to9W;Soares_fetal_lung_NbHL19W;HBGB's differential consolidation;Aorta endothelial cells+TNF-a;NCI_CGAP_Co12;Lung, Cancer (4005163 B7): Invasive, Poorly Diff. Adenocarcinoma, Metastatic;NCI_CGAP_Ut4;Human Fetal Epithelium (Skin);Breast, Cancer: (4004943 A5);NCI_CGAP_Gas4;Stratagene endothelial cell 937223;Human Pancreas Tumor;Liver, Hepatoma;Stratagene liver (#937224);Stratagene colon (#937204);CHME Cell Line;treated 5 hrs;Human Pancreas Tumor; Reexcision;Epithelial-TNFa and INF induced;Human Placenta;NCI_CGAP_GC6;Endothelial-induced;NCI_CGAP_;Brn25;human tonsils;Stratagene lung (#937210);Human Primary Breast Cancer Reexcision;Human fetal heart, Lambda ZAP Express;Colon Tumor; Stomach Normal; Stomach Tumour;Soares melanocyte 2NbHM;Soares_total_fetus_Nb2HF8_{—}9w;Soares_pregnant_uterus_NbHPU;Soares_NFL_T_GBC_S1;Soares placenta Nb2HP;NCI_CGAP_Sub3;HeLa cell line;NCI_CGAP_Ov35;Human Greater Omentum, fract II remake,;Human Pancreatic Langerhans;Human Fetal Liver, subtracted, neg clone;Ea.hy.926 cell line;HPAS (human pancreas, subtracted);NCI_CGAP_Lu19;NCI_CGAP_HN4;NCI_CGAP_Co16;H. Normalized Fetal Liver, II;Human Adult Pulmonary;Human Pancreatic Carcinoma;Hodgkin's Lymphoma I;Healing Abdomen wound;70&90 min post incision;Human Thyroid;Lung Carcinoma A549 TNFalpha activated;Stomach cancer (human);re-excision;Smooth muscle, IL1b induced;NCI_CGAP_Co10;Salivary Gland, Lib 2;NCI_CGAP_Pr12;Diabetic Liver #1042;Human Adult Small Intestine;Breast, Normal: (4005522B2);Gessler Wilms tumor;Pancreatic cancer #14677A1L;Human Thymus;Human Umbilical Vein; Reexcision;Adipose tissue (diabetic type II) #41661;Stratagene fetal spleen (#937205);Healing groin wound—zero hr post-incision (control);Stratagene HeLa cell s3 937216;Human Uterine Cancer;Soares_NSF_F8_{—}9W_OT_PA_P_S1;Epithelial-TNFa and INF induced2;Human Adipose;Human Whole Six Week Old Embryo;Olfactory epithelium;nasalcavity;NCI_CGAP_Co3;Hepatocellular Tumor;re-excision;Fetal Liver, subtraction II;breast lymph node CDNA library;NCI_CGAP_Co8;Colon Carcinoma;Human Testes Tumor;Colon Normal II;Ovary, Cancer (9809C332): Poorly differentiated adenocarcinoma;Ovary, Cancer(4004650 A3): Well-Differentiated Micropapillary Serous Carcinoma;Normal colon;Human Fetal Lung III;Human Testes, Reexcision;Endothelial cells-control; Human Adult Pulmonary;re-excision;Human Placenta;Prostate Adenocarcinoma;Liver Normal Met5No;NCI_CGAP_Lu5;H. Frontal cortex,epileptic;re-excision; NTERA2 teratocarcinoma cell line+retinoic acid (14 days);Soares_parathyroid_tumor_NbHPA;Soares_testis_NHT;Soares infant brain 1NIB;HEMBA1;NCI_CGAP_Co19;NCI_CGAP_Lu27;NCI_CGAP_Skn3;NCI_CGAP_Skn 4;NCI_CGAP_Brn53;NCI_CGAP_Brn66;NCI_CGAP_Brn70;NCI_CGAP_Kid13;NIH_MG C_{—}69

[0142] Polynucleotides and polypeptides of the invention are useful as reagents for differential identification of the tissue(s) or cell type(s) present in a biological sample and for diagnosis of diseases and conditions which include but are not limited to: cancer and other hyperproliferative disorders, as well as diabetes. Similarly, polypeptides and antibodies directed to these polypeptides are useful in providing immunological probes for differential identification of the tissue(s) or cell type(s). For a number of disorders of the above tissues or cells, particularly of the reproductive and glucose control systems, expression of this gene at significantly higher or lower levels may be routinely detected in certain tissues or cell types (e.g., cancerous and wounded tissues) or bodily fluids (e.g., serum, plasma, urine, synovial fluid and spinal fluid) or another tissue or sample taken from an individual having such a disorder, relative to the standard gene expression level, i.e., the expression level in healthy tissue or bodily fluid from an individual not having the disorder.

[0143] The tissue distribution and homology to ephrin-A1 a protein known to be induced by TNF alpha, indicates that polynucleotides and polypeptides corresponding to this gene are useful for diagnosis and treatment of cancer and other hyperproliferative disorders. In addition, the discovery of this gene in diabetes related tissues (pancreas) suggests a role in diabetes and diseases such as obesity that are related to glucose control.

Features of Protein Encoded by Gene No: 81

[0144] The translation product of this gene shares sequence homology with Human IgE Fc receptor gamma chain which is a major component of the high affinity IgE receptor; 2 gamma chains are paired with an alpha and beta chain in the mature protein. This protein apparently arose from a gene duplication event with the T-cell receptor zeta chain. This receptor is known to be a mediator of allergy (See, e,g., Kunster et al. J Biol Chem Apr. 15 1990;265(11):6448-52).

[0145] This gene is expressed primarily in Human activated monocytes and to a lesser extent in other immune cels (macrophages, dendritic cells, neutrophils, etc) as well as other cell types. A complete list of known expression is: Human Activated Monocytes;Soares placenta Nb2HP;CD40 activated monocyte dendridic cells;NCI_CGAP_Kid5;Soares fetal liver spleen 1NFLS;Macrophage (GM-CSF treated);H Macrophage (GM-CSF treated), re-excision; Primary Dendritic cells,frac 2;DCB;Breast, Cancer: (4005522 A2);Macrophage-oxLDL; Spleen, Chronic lymphocytic leukemia;Human Bone Marrow, treated;Primary Dendritic Cells, lib 1;Stratagene placenta (#937225);Human Activated T-Cells;Human Activated T-Cells, re-excision;mononucleocytes from patient;Macrophage-oxLDL; re-excision; breast lymph node CDNA library;Neutrophils control; re-excision;Human Osteoclastoma;Stratagene lung (#937210);NCI_CGAP_Brn23;Soares_multiple_sclerosis_{—}2NbHMSP; Soares_total_fetus_Nb2HF8_{—}9w;Soares_fetal_liver_spleen_{—}1NFLS_S1;Soares_NFL_T_GB C_S1;Soares_NhHMPu_S1;NN0047;Human Membrane Bound Polysomes;Human Macrophage, subtracted;Larynx carcinoma IV;PCR, pBMC I/C treated;Human Fetal Brain, normalized AC5002;Activated T-Cells, 8 hrs, subtracted;NCI_CGAP_Lu19;Lung, Normal: (4005313 B 1);Untreated Monocytes;prostate-edited;Human promyelocyte;NCI_CGAP_Br1.1;Human Fetal Bone;SGAH patient #9;NCI_CGAP_Ut3;Human Normal Breast;Ovarian cancer, Serous Papillary Adenocarcinoma;Apoptotic T-cell, re-excision;Patient #6 Acute Myeloid Leukemia/SGAH;pBMC stimulated w/poly I/C;H. Meningioma, M1;Ovarian Cancer;Human Neutrophil;pancreatic cancer sample #4004959A1;Diabetic Skeletal Muscle #42352-L;Human Prostate Cancer, Stage C; re-excission;NCI_CGAP_Gas4;Eosinophils from John Hopkins University;NCI_CGAP_Br2;Epithelial-TNFa and INF induced;NCI_CGAP_Pan1;Ovary, Cancer: (4004576 A8);12 Week Old Early Stage Human;NCI_CGAP_GC4;CD34 depleted Buffy Coat (Cord Blood), re-excision;Human Neutrophil, Activated;NCI_CGAP_Brn25;NCI_CGAP_Kid3;Soares_placenta_{—}8to9weeks_{—}2NbHP8to9W; Liver Tumour Met 5 Tu;Neutrophils IL-1 and LPS induced;NCI_CGAP_Lu5;Dendritic cells, pooled;neutrophils control;Colon Tumor II;Colon Normal III;Soares_fetal_heart_NbHH19W;Human blood platelets;ADB;BM;EN0013;cdA

[0146] Polynucleotides and polypeptides of the invention are useful as reagents for differential identification of the tissue(s) or cell type(s) present in a biological sample and for diagnosis of diseases and conditions which include but are not limited to: diabetes, allergy and infectious diseases as well as autoimmune disorders such as lupus. Similarly, polypeptides and antibodies directed to these polypeptides are useful in providing immunological probes for differential identification of the tissue(s) or cell type(s). For a number of disorders of the above tissues or cells, particularly of the immune system and disorders related to aberrant activity of the immune system, expression of this gene at significantly higher or lower levels may be routinely detected in certain tissues or cell types (e.g., immune, cancerous and wounded tissues) or bodily fluids (e.g., serum, plasma, urine, synovial fluid and spinal fluid) or another tissue or sample taken from an individual having such a disorder, relative to the standard gene expression level, i.e., the expression level in healthy tissue or bodily fluid from an individual not having the disorder. Embodiments of the invention encompass using polynucleotides and polypeptides (including fragments and variants thereof, and also antibodies, agonists and antagonists thereof) to prevent, diagnose, treat, or ameliorate a disease or disorder. In preferred embodiments, the present invention encompasses a method of preventing, diagnosing, treating, or ameliorating a disease or disorder related to one, two, three, or more, of the cells, tissues, and organs where the polynucleotide and/or polypeptide is expressed (for example, as indicated in Column 8 of Table 1B) or as indicated in the “Preferred Indications” column of Table 1C; comprising administering to a patient in which such prevention, diagnosis, treatment, or amelioration is desired a protein, nucleic acid, or antibody of the invention (or fragment or variant thereof) represented by Table 1A and Table 1C (in the same row as the disease or disorder to be treated is listed in the “Preferred Indications” column of Table 1C) in an amount effective to prevent, diagnose, treat, or ameliorate the disease or disorder. In another embodiment, the present invention also encompasses methods of preventing, diagnosing, treating, or ameliorating a disease or disorder related to one, two, three, or more, of the cells, tissues, and organs where the polynucleotide and/or polypeptide is expressed (for example, as indicated in Column 8 of Table 1B) or as indicated in the “Preferred Indications” column of Table 1C; comprising administering to a patient diagonistic or therapeutic molecules in combination with proteins, nucleic acids, or antibodies of the invention (or fragments or variants thereof) as represented by Table 1A and Table 1C.

[0147] The tissue distribution and homology to IgE receptor Fc gamma chain, part of a receptor that has a major role in the allergic response, indicates that polynucleotides and polypeptides corresponding to this gene are useful for diagnosis and treatment of allergies, infectious diseases, and autoimmune disorders.

Features of Protein Encoded by Gene No: 82

[0148] The translation product of this gene shares sequence homology with Complement subcomponent C1q chain C precursor which is known to be important in mediating the cellular immune response.

[0149] This gene is expressed primarily in Primary dendritic cells and to a lesser extent in a variety immune/hematopoetic cell types and to a lesser extent in a variety of normal and diseased tissues. The complete list of known tissues is: Primary Dendritic Cells, lib 1;Primary Dendritic cells,frac 2;Spleen, Chronic lymphocytic leukemia;Soares fetal liver spleen 1NFLS;NCI_CGAP_Co8;Colon Tumor II;Human Placenta;Human Adult Pulmonary;re-excision; Stomach Normal;Soares placenta Nb2HP;Soares_fetal_heart_NbHH19W;CD40 activated monocyte dendridic cells;Soares breast 2NbHBst;NCI_CGAP_Pan1;Human T-Cell Lymphoma;Soares_placenta_{—}8to9weeks_{—}2NbHP8to9W;Liver Normal Met5No;Stomach Tumour;Colon Normal III;Human Chronic Synovitis;Hemangiopericytoma;Human Adipose;Stratagene liver (#937224);Ovary, Cancer: (4004576 A8);Human Placenta (re-excision); Colon Tumor;Rejected Kidney, lib 4;Colon Normal II;Ovary, Cancer (9809C332): Poorly differentiated adenocarcinoma;NCI_CGAP_Brn25;Colon, normal;Soares_pregnant_uterus_NbHPU;Soares_NFL_T_GBC_S1;Soares infant brain 1NIB;b4HB3MA-Cot109+10-Bio;Human Resting Macrophage;Human Thymus;Human Adult Lymph Node, subtracted;Human Spleen;Prostate BPH,Lib 2, subtracted;Human Gastrocnemius;NCI_CGAP_Co4;Human fetal lung;Lung, Normal: (4005313 B 1);Normal skeletal muscle #96-08-A171;NCI_CGAP_Eso2;Normalized infant brain, Bento Soares;stomach cancer (human);Barstead spleen HPLRB2;NCI_CGAP_Lu24;SKIN;NCI_CGAP_Lu1;Human Pituitary, subtracted;NCI_CGAP_Ut3;Human Synovium;Stomach cancer (human);re-excision; NCI_CGAP_Co9;Breast, Cancer: (4005522 A2);Patient #6 Acute Myeloid Leukemia/SGAH;Ovarian cancer, Serous Papillary Adenocarcinoma;NCI_CGAP_Co14;B Cell lymphoma;Human Osteosarcoma;Human Colon; re-excision;Human Adipose Tissue, re-excision; wilm's tumor;Spleen metastic melanoma;Breast, Cancer: (4004943 A5);Adipose tissue (diabetic type I, obese) #41706;Breast, Normal: (4005522B2);Brain Frontal Cortex, re-excision; Pancreatic cancer #14677A1L;NCI_CGAP_Ut1;NCI_CGAP_Kid6;Clontech human aorta polyA+ mRNA (#6572);Ovary, Cancer: (4004332 A2);Human Pancreas Tumor;Human Fetal Brain;Ulcerative Colitis;Human Gall Bladder;Human Liver, normal;Palate normal;Fetal Heart; reexcision;Soares breast 3NbHBst;NCI_CGAP_GC4;Human Pancreas Tumor; Reexcision;Human Fetal Kidney; Reexcision;Normal colon;Pancreas normal PCA4 No;Human Placenta;human tonsils;NCI_CGAP_Kid5;Liver Tumour Met 5 Tu;Rectum tumour;Soares ovary tumor NbHOT;Human Bone Marrow, treated;Colon Normal;NCI_CGAP_Lu5;Hodgkin's Lymphoma II;Soares_fetal_lung_NbHL19W;Soares_total_fetus_Nb2HF8_{—}9w;Soares_fetal_liver_spleen_{—}1NFLS_S1;Soares_testis_NHT;GKC;NCI_CGAP_Ov39;NCI_CGAP_Sub3;NCI_CGAP_B m65

[0150] Polynucleotides and polypeptides of the invention are useful as reagents for differential identification of the tissue(s) or cell type(s) present in a biological sample and for diagnosis of diseases and conditions which include but are not limited to: diabetes, cancer and other proliferative disorders, infectious diseases, allergy, and autoimmune disorders. Similarly, polypeptides and antibodies directed to these polypeptides are useful in providing immunological probes for differential identification of the tissue(s) or cell type(s). For a number of disorders of the above tissues or cells, particularly of the immune system, expression of this gene at significantly higher or lower levels may be routinely detected in certain tissues or cell types (e.g., cancerous and wounded tissues) or bodily fluids (e.g., serum, plasma, urine, synovial fluid and spinal fluid) or another tissue or sample taken from an individual having such a disorder, relative to the standard gene expression level, i.e., the expression level in healthy tissue or bodily fluid from an individual not having the disorder. Embodiments of the invention encompass using polynucleotides and polypeptides (including fragments and variants thereof, and also antibodies, agonists and antagonists thereof) to prevent, diagnose, treat, or ameliorate a disease or disorder. In preferred embodiments, the present invention encompasses a method of preventing, diagnosing, treating, or ameliorating a disease or disorder related to one, two, three, or more, of the cells, tissues, and organs where the polynucleotide and/or polypeptide is expressed (for example, as indicated in Column 8 of Table 1B) or as indicated in the “Preferred Indications” column of Table 1C; comprising administering to a patient in which such prevention, diagnosis, treatment, or amelioration is desired a protein, nucleic acid, or antibody of the invention (or fragment or variant thereof) represented by Table 1A and Table 1C (in the same row as the disease or disorder to be treated is listed in the “Preferred Indications” column of Table 1C) in an amount effective to prevent, diagnose, treat, or ameliorate the disease or disorder. In another embodiment, the present invention also encompasses methods of preventing, diagnosing, treating, or ameliorating a disease or disorder related to one, two, three, or more, of the cells, tissues, and organs where the polynucleotide and/or polypeptide is expressed (for example, as indicated in Column 8 of Table 1B) or as indicated in the “Preferred Indications” column of Table 1C; comprising administering to a patient diagonistic or therapeutic molecules in combination with proteins, nucleic acids, or antibodies of the invention (or fragments or variants thereof) as represented by Table 1A and Table 1C.

[0151] The tissue distribution and homology to C1q chain C precursor indicates that polynucleotides and polypeptides corresponding to this gene are useful for immunomodulation, particularly in the treatment of cancer and other proliferative disorders, infectious diseases, allergy, and autoimmune disorders.

Features of Protein Encoded by Gene No: 83

[0152] The translation product of this gene shares sequence homology with pancreatic colipase which is thought to be important in digestion of fats. In the absence of colipase, the activity of pancreatic lipase is inhibited by bile salts, preventing efficient triglyceride metabolism. (see, e.g., Biochemistry Jan. 23 1990;29(3):823-8)

[0153] This gene is expressed exclusively in pancreas.

[0154] Polynucleotides and polypeptides of the invention are useful as reagents for differential identification of the tissue(s) or cell type(s) present in a biological sample and for diagnosis of diseases and conditions which include but are not limited to: diabetes (Type-I and Type II, obesity, endocrine disorders, and pancreatic cancer. Similarly, polypeptides and antibodies directed to these polypeptides are useful in providing immunological probes for differential identification of the tissue(s) or cell type(s). For a number of disorders of the above tissues or cells, particularly of the pancreas, expression of this gene at significantly higher or lower levels may be routinely detected in certain tissues or cell types (e.g., endocrine, cancerous and wounded tissues) or bodily fluids (e.g., serum, plasma, urine, synovial fluid and spinal fluid) or another tissue or sample taken from an individual having such a disorder, relative to the standard gene expression level, i.e., the expression level in healthy tissue or bodily fluid from an individual not having the disorder. Embodiments of the invention encompass using polynucleotides and polypeptides (including fragments and variants thereof, and also antibodies, agonists and antagonists thereof) to prevent, diagnose, treat, or ameliorate a disease or disorder. In preferred embodiments, the present invention encompasses a method of preventing, diagnosing, treating, or ameliorating a disease or disorder related to one, two, three, or more, of the cells, tissues, and organs where the polynucleotide and/or polypeptide is expressed (for example, as indicated in Column 8 of Table 1B) or as indicated in the “Preferred Indications” column of Table 1C; comprising administering to a patient in which such prevention, diagnosis, treatment, or amelioration is desired a protein, nucleic acid, or antibody of the invention (or fragment or variant thereof) represented by Table 1A and Table 1C (in the same row as the disease or disorder to be treated is listed in the “Preferred Indications” column of Table 1C) in an amount effective to prevent, diagnose, treat, or ameliorate the disease or disorder. In another embodiment, the present invention also encompasses methods of preventing, diagnosing, treating, or ameliorating a disease or disorder related to one, two, three, or more, of the cells, tissues, and organs where the polynucleotide and/or polypeptide is expressed (for example, as indicated in Column 8 of Table 1B) or as indicated in the “Preferred Indications” column of Table 1C; comprising administering to a patient diagonistic or therapeutic molecules in combination with proteins, nucleic acids, or antibodies of the invention (or fragments or variants thereof) as represented by Table 1A and Table 1C.

[0155] The tissue distribution (in pancreas) and homology to colipase indicates that polynucleotides and polypeptides corresponding to this gene are useful for diagnosis and treatment of diabetes, diabetes related obesity, and non-diabetes related obesity.

Features of Protein Encoded by Gene No: 84

[0156] This gene is expressed primarily in eosinophils and to a lesser extent in lung cancer, brain, and bone marrow.

[0157] Polynucleotides and polypeptides of the invention are useful as reagents for differential identification of the tissue(s) or cell type(s) present in a biological sample and for diagnosis of diseases and conditions which include but are not limited to: allergy and asthma. Similarly, polypeptides and antibodies directed to these polypeptides are useful in providing immunological probes for differential identification of the tissue(s) or cell type(s). For a number of disorders of the above tissues or cells, particularly of the immune system, expression of this gene at significantly higher or lower levels may be routinely detected in certain tissues or cell types (e.g., cancerous and wounded tissues) or bodily fluids (e.g., serum, plasma, urine, synovial fluid and spinal fluid) or another tissue or sample taken from an individual having such a disorder, relative to the standard gene expression level, i.e., the expression level in healthy tissue or bodily fluid from an individual not having the disorder.

[0158] Embodiments of the invention encompass using polynucleotides and polypeptides (including fragments and variants thereof, and also antibodies, agonists and antagonists thereof) to prevent, diagnose, treat, or ameliorate a disease or disorderr (such as, for example, allergies and asthma). In preferred embodiments, the present invention encompasses a method of preventing, diagnosing, treating, or ameliorating a disease or disorder related to one, two, three, or more, of the cells, tissues, and organs where the polynucleotide and/or polypeptide is expressed (for example, as indicated in Column 8 of Table 1B) or as indicated in the “Preferred Indications” column of Table 1C; comprising administering to a patient in which such prevention, diagnosis, treatment, or amelioration is desired a protein, nucleic acid, or antibody of the invention (or fragment or variant thereof) represented by Table 1A and Table 1C (in the same row as the disease or disorder to be treated is listed in the “Preferred Indications” column of Table 1C) in an amount effective to prevent, diagnose, treat, or ameliorate the disease or disorder.

[0159] In another embodiment, the present invention also encompasses methods of preventing, diagnosing, treating, or ameliorating a disease or disorder related to one, two, three, or more, of the cells, tissues, and organs where the polynucleotide and/or polypeptide is expressed (for example, as indicated in Column 8 of Table 1B) or as indicated in the “Preferred Indications” column of Table 1C; comprising administering to a patient diagnostic or therapeutic molecules in combination with proteins, nucleic acids, or antibodies of the invention (or fragments or variants thereof) as represented by Table 1A and Table 1C. Expression of this gene in eosinophils, brain, bone marrow, and lung cancer indicates that polynucleotides and polypeptides corresponding to this gene are useful for the treatment and/or detection of immune disorders including allergy, asthma, eosinophilia, eosinopenia, eosinophilic granuloma, arthritis, immunodeficiencies, lupus and leukemia, hematopoietic disorders, neurological disorders, and lung cancer.

Features of Protein Encoded by Gene No: 85

[0160] This gene is expressed primarily in malignant tissues, such as lung cancer, prostate cell line and to a lesser extent in Wilm's tumor and leukemia.

[0161] Polynucleotides and polypeptides of the invention are useful as reagents for differential identification of the tissue(s) or cell type(s) present in a biological sample and for diagnosis of diseases and conditions which include but are not limited to: cancers (such as lung and prostate cancer, and leukemia/lymphoma). Similarly, polypeptides and antibodies directed to these polypeptides are useful in providing immunological probes for differential identification of the tissue(s) or cell type(s). For a number of disorders of the above tissues or cells, particularly of lung, prostate, and hematopoietic cells, expression of this gene at significantly higher or lower levels may be routinely detected in certain tissues or cell types (e.g., cancerous and wounded tissues) or bodily fluids (e.g., serum, plasma, urine, synovial fluid and spinal fluid) or another tissue or sample taken from an individual having such a disorder, relative to the standard gene expression level, i.e., the expression level in healthy tissue or bodily fluid from an individual not having the disorder.

[0162] Embodiments of the invention encompass using polynucleotides and polypeptides (including fragments and variants thereof, and also antibodies, agonists and antagonists thereof) to prevent, diagnose, treat, or ameliorate a disease or disorder (such as, for example, leukemia and lymphoma). In preferred embodiments, the present invention encompasses a method of preventing, diagnosing, treating, or ameliorating a disease or disorder related to one, two, three, or more, of the cells, tissues, and organs where the polynucleotide and/or polypeptide is expressed (for example, as indicated in Column 8 of Table 1B) or as indicated in the “Preferred Indications” column of Table 1C; comprising administering to a patient in which such prevention, diagnosis, treatment, or amelioration is desired a protein, nucleic acid, or antibody of the invention (or fragment or variant thereof) represented by Table 1A and Table 1C (in the same row as the disease or disorder to be treated is listed in the “Preferred Indications” column of Table 1C) in an amount effective to prevent, diagnose, treat, or ameliorate the disease or disorder.

[0163] In another embodiment, the present invention also encompasses methods of preventing, diagnosing, treating, or ameliorating a disease or disorder related to one, two, three, or more, of the cells, tissues, and organs where the polynucleotide and/or polypeptide is expressed (for example, as indicated in Column 8 of Table 1B) or as indicated in the “Preferred Indications” column of Table 1C; comprising administering to a patient diagnostic or therapeutic molecules in combination with proteins, nucleic acids, or antibodies of the invention (or fragments or variants thereof) as represented by Table 1A and Table 1C. The tissue distribution/expression indicates that polynucleotides and polypeptides corresponding to this gene are useful for the diagnosis and treatment of various cancer/malignancy including but not limited to lung cancer, prostate cancer, Wilms tumor, leukemia and lymphoma.

Features of Protein Encoded by Gene No: 86

[0164] This gene is expressed primarily in eosinophils.

[0165] Polynucleotides and polypeptides of the invention are useful as reagents for differential identification of the tissue(s) or cell type(s) present in a biological sample and for diagnosis of diseases and conditions which include but are not limited to: allergy and asthma. Similarly, polypeptides and antibodies directed to these polypeptides are useful in providing immunological probes for differential identification of the tissue(s) or cell type(s). For a number of disorders of the above tissues or cells, particularly of the immune system, expression of this gene at significantly higher or lower levels may be routinely detected in certain tissues or cell types (e.g., cancerous and wounded tissues) or bodily fluids (e.g., serum, plasma, urine, synovial fluid and spinal fluid) or another tissue or sample taken from an individual having such a disorder, relative to the standard gene expression level, i.e., the expression level in healthy tissue or bodily fluid from an individual not having the disorder.

[0166] Embodiments of the invention encompass using polynucleotides and polypeptides (including fragments and variants thereof, and also antibodies, agonists and antagonists thereof) to prevent, diagnose, treat, or ameliorate a disease or disorderr (such as, for example, allergies and asthma). In preferred embodiments, the present invention encompasses a method of preventing, diagnosing, treating, or ameliorating a disease or disorder related to one, two, three, or more, of the cells, tissues, and organs where the polynucleotide and/or polypeptide is expressed (for example, as indicated in Column 8 of Table 1B) or as indicated in the “Preferred Indications” column of Table 1C; comprising administering to a patient in which such prevention, diagnosis, treatment, or amelioration is desired a protein, nucleic acid, or antibody of the invention (or fragment or variant thereof) represented by Table 1A and Table 1C (in the same row as the disease or disorder to be treated is listed in the “Preferred Indications” column of Table 1C) in an amount effective to prevent, diagnose, treat, or ameliorate the disease or disorder.

[0167] In another embodiment, the present invention also encompasses methods of preventing, diagnosing, treating, or ameliorating a disease or disorder related to one, two, three, or more, of the cells, tissues, and organs where the polynucleotide and/or polypeptide is expressed (for example, as indicated in Column 8 of Table 1B) or as indicated in the “Preferred Indications” column of Table 1C; comprising administering to a patient diagnostic or therapeutic molecules in combination with proteins, nucleic acids, or antibodies of the invention (or fragments or variants thereof) as represented by Table 1A and Table 1C. Expression of this gene in eosinophils indicates that polynucleotides and polypeptides corresponding to this gene are useful for the treatment and/or detection of immune disorders including allergy, asthma, eosinophilia, eosinopenia, eosinophilic granuloma, arthritis, immunodeficiencies, lupus and leukemia.

Features of Protein Encoded by Gene No: 87

[0168] This gene is expressed primarily in eosinophils.

[0169] Polynucleotides and polypeptides of the invention are useful as reagents for differential identification of the tissue(s) or cell type(s) present in a biological sample and for diagnosis of diseases and conditions which include but are not limited to: allergy, asthma, and autoimmune disorders. Similarly, polypeptides and antibodies directed to these polypeptides are useful in providing immunological probes for differential identification of the tissue(s) or cell type(s). For a number of disorders of the above tissues or cells, particularly of the immune system expression of this gene at significantly higher or lower levels may be routinely detected in certain tissues or cell types (e.g., cancerous and wounded tissues) or bodily fluids (e.g., serum, plasma, urine, synovial fluid and spinal fluid) or another tissue or sample taken from an individual having such a disorder, relative to the standard gene expression level, i.e., the expression level in healthy tissue or bodily fluid from an individual not having the disorder.

[0170] Embodiments of the invention encompass using polynucleotides and polypeptides (including fragments and variants thereof, and also antibodies, agonists and antagonists thereof) to prevent, diagnose, treat, or ameliorate a disease or disorderr (such as, for example, allergies and asthma). In preferred embodiments, the present invention encompasses a method of preventing, diagnosing, treating, or ameliorating a disease or disorder related to one, two, three, or more, of the cells, tissues, and organs where the polynucleotide and/or polypeptide is expressed (for example, as indicated in Column 8 of Table 1B) or as indicated in the “Preferred Indications” column of Table 1C; comprising administering to a patient in which such prevention, diagnosis, treatment, or amelioration is desired a protein, nucleic acid, or antibody of the invention (or fragment or variant thereof) represented by Table 1A and Table 1C (in the same row as the disease or disorder to be treated is listed in the “Preferred Indications” column of Table 1C) in an amount effective to prevent, diagnose, treat, or ameliorate the disease or disorder.

[0171] In another embodiment, the present invention also encompasses methods of preventing, diagnosing, treating, or ameliorating a disease or disorder related to one, two, three, or more, of the cells, tissues, and organs where the polynucleotide and/or polypeptide is expressed (for example, as indicated in Column 8 of Table 1B) or as indicated in the “Preferred Indications” column of Table 1C; comprising administering to a patient diagnostic or therapeutic molecules in combination with proteins, nucleic acids, or antibodies of the invention (or fragments or variants thereof) as represented by Table 1A and Table 1C. The tissue distribution of this gene in eosinophils indicates that polynucleotides and polypeptides corresponding to this gene are useful for the treatment and/or detection of immune disorders including allergy, asthma, eosinophilia, eosinopenia, eosinophilic granuloma, arthritis, immunodeficiencies, lupus and leukemia.

Features of Protein Encoded by Gene No: 88

[0172] This gene is expressed primarily in eosinophils and dendritic cells.

[0173] Polynucleotides and polypeptides of the invention are useful as reagents for differential identification of the tissue(s) or cell type(s) present in a biological sample and for diagnosis of diseases and conditions which include but are not limited to: asthma, allergies, inflammation, autoimmune disorders, and other disorders of the immune system including cancer. Similarly, polypeptides and antibodies directed to these polypeptides are useful in providing immunological probes for differential identification of the tissue(s) or cell type(s). For a number of disorders of the above tissues or cells, particularly of the immune system, expression of this gene at significantly higher or lower levels may be routinely detected in certain tissues or cell types (e.g., cancerous and wounded tissues) or bodily fluids (e.g., serum, plasma, urine, synovial fluid and spinal fluid) or another tissue or sample taken from an individual having such a disorder, relative to the standard gene expression level, i.e., the expression level in healthy tissue or bodily fluid from an individual not having the disorder.

[0174] Embodiments of the invention encompass using polynucleotides and polypeptides (including fragments and variants thereof, and also antibodies, agonists and antagonists thereof) to prevent, diagnose, treat, or ameliorate a disease or disorder (such as, for example, allergies and asthma). In preferred embodiments, the present invention encompasses a method of preventing, diagnosing, treating, or ameliorating a disease or disorder related to one, two, three, or more, of the cells, tissues, and organs where the polynucleotide and/or polypeptide is expressed (for example, as indicated in Column 8 of Table 1B) or as indicated in the “Preferred Indications” column of Table 1C; comprising administering to a patient in which such prevention, diagnosis, treatment, or amelioration is desired a protein, nucleic acid, or antibody of the invention (or fragment or variant thereof) represented by Table 1A and Table 1C (in the same row as the disease or disorder to be treated is listed in the “Preferred Indications” column of Table 1C) in an amount effective to prevent, diagnose, treat, or ameliorate the disease or disorder.

[0175] In another embodiment, the present invention also encompasses methods of preventing, diagnosing, treating, or ameliorating a disease or disorder related to one, two, three, or more, of the cells, tissues, and organs where the polynucleotide and/or polypeptide is expressed (for example, as indicated in Column 8 of Table 1B) or as indicated in the “Preferred Indications” column of Table 1C; comprising administering to a patient diagnostic or therapeutic molecules in combination with proteins, nucleic acids, or antibodies of the invention (or fragments or variants thereof) as represented by Table 1A and Table 1C. Expression of this gene and its encoded polypeptides in immune cells particularly eosinophils and dendritic cells indicates that this gene may be useful for the treatment and diagnosis of disorders of the immune system such as asthma, autoimmune syndromes such as systemic lupus erythematosus and rheumatoid arthritis as well as immune deficiency syndromes and allergies. Furthermore, since these immune cells function as antigen presenting cells, the gene and its protein may be useful for the treatment of cancer and other diseases where priming of immune system with specific disease antigens may prove useful.

Features of Protein Encoded by Gene No: 89

[0176] This gene is expressed primarily in eosinophils.

[0177] Polynucleotides and polypeptides of the invention are useful as reagents for differential identification of the tissue(s) or cell type(s) present in a biological sample and for diagnosis of diseases and conditions which include but are not limited to: allergy and asthma. Similarly, polypeptides and antibodies directed to these polypeptides are useful in providing immunological probes for differential identification of the tissue(s) or cell type(s). For a number of disorders of the above tissues or cells, particularly of the immune system, expression of this gene at significantly higher or lower levels may be routinely detected in certain tissues or cell types (e.g., cancerous and wounded tissues) or bodily fluids (e.g., serum, plasma, urine, synovial fluid and spinal fluid) or another tissue or sample taken from an individual having such a disorder, relative to the standard gene expression level, i.e., the expression level in healthy tissue or bodily fluid from an individual not having the disorder.

[0178] Embodiments of the invention encompass using polynucleotides and polypeptides (including fragments and variants thereof, and also antibodies, agonists and antagonists thereof) to prevent, diagnose, treat, or ameliorate a disease or disorder (such as, for example, allergies and asthma). Preferred embodiments, the present invention encompasses a method of preventing, diagnosing, treating, or ameliorating a disease or disorder related to one, two, three, or more, of the cells, tissues, and organs where the polynucleotide and/or polypeptide is expressed (for example, as indicated in Column 8 of Table 1B) or as indicated in the “Preferred Indications” column of Table 1C; comprising administering to a patient in which such prevention, diagnosis, treatment, or amelioration is desired a protein, nucleic acid, or antibody of the invention (or fragment or variant thereof) represented by Table 1A and Table 1C (in the same row as the disease or disorder to be treated is listed in the “Preferred Indications” column of Table 1C) in an amount effective to prevent, diagnose, treat, or ameliorate the disease or disorder.

[0179] In another embodiment, the present invention also encompasses methods of preventing, diagnosing, treating, or ameliorating a disease or disorder related to one, two, three, or more, of the cells, tissues, and organs where the polynucleotide and/or polypeptide is expressed (for example, as indicated in Column 8 of Table 1B) or as indicated in the “Preferred Indications” column of Table 1C; comprising administering to a patient diagnostic or therapeutic molecules in combination with proteins, nucleic acids, or antibodies of the invention (or fragments or variants thereof) as represented by Table 1A and Table 1C. Expression of this gene in eosinophils indicates that polynucleotides and polypeptides corresponding to this gene are useful for the treatment and/or detection of immune disorders including allergy, asthma, eosinophilia, eosinopenia, eosinophilic granuloma, arthritis, immunodeficiencies, lupus and leukemia.

Definitions

[0180] The following definitions are provided to facilitate understanding of certain terms used throughout this specification.

[0181] In the present invention, “isolated” refers to material removed from its original environment (e.g., the natural environment if it is naturally occurring), and thus is altered “by the hand of man” from its natural state. For example, an isolated polynucleotide could be part of a vector or a composition of matter, or could be contained within a cell, and still be “isolated” because that vector, composition of matter, or particular cell is not the original environment of the polynucleotide. The term “isolated” does not refer to genomic or cDNA libraries, whole cell total or mRNA preparations, genomic DNA preparations (including those separated by electrophoresis and transferred onto blots), sheared whole cell genomic DNA preparations or other compositions where the art demonstrates no distinguishing features of the polynucleotide/sequences of the present invention.

[0182] In the present invention, a “secreted” protein refers to those proteins capable of being directed to the ER, secretory vesicles, or the extracellular space as a result of a signal sequence, as well as those proteins released into the extracellular space without necessarily containing a signal sequence. If the secreted protein is released into the extracellular space, the secreted protein can undergo extracellular processing to produce a “mature” protein. Release into the extracellular space can occur by many mechanisms, including exocytosis and proteolytic cleavage.

[0183] As used herein, a “polynucleotide” refers to a molecule having a nucleic acid sequence encoding SEQ ID NO:Y or a fragment or variant thereof (e.g., the polypeptide delinated in columns fourteen and fifteen of Table 1A); a nucleic acid sequence contained in SEQ ID NO:X (as described in column 5 of Table 1A and/or column 4 of Table 1B) or the complement thereof; a cDNA sequence contained in Clone ID: (as described in column 2 of Table 1A and/or 1B and contained within a library deposited with the ATCC). For example, the polynucleotide can contain the nucleotide sequence of the full length cDNA sequence, including the 5′ and 3′ untranslated sequences, the coding region, as well as fragments, epitopes, domains, and variants of the nucleic acid sequence. Moreover, as used herein, a “polypeptide” refers to a molecule having an amino acid sequence encoded by a polynucleotide of the invention as broadly defined (obviously excluding poly-Phenylalanine or poly-Lysine peptide sequences which result from translation of a polyA tail of a sequence corresponding to a cDNA).

[0184] In the present invention, “SEQ ID NO:X” was often generated by overlapping sequences contained in multiple clones (contig analysis). A representative clone containing all or most of the sequence for SEQ ID NO:X is deposited at Human Genome Sciences, Inc. (HGS) in a catalogued and archived library. As shown, for example, in column 2 of Table 1B, each clone is identified by a cDNA Clone ID (identifier generally referred to herein as Clone ID:). Each Clone ID is unique to an individual clone and the Clone ID is all the information needed to retrieve a given clone from the HGS library. Table 4 provides a list of the deposited cDNA libraries. One can use the Clone ID: to determine the library source by reference to Table 4. Table 4 lists the deposited cDNA libraries by name and links each library to an ATCC Deposit. Library names contain four characters, for example, “HTWE.” The name of a cDNA clone (Clone ID) isolated from that library begins with the same four characters, for example “HTWEP07”. As mentioned below, Table 1A and/or 1B correlates the Clone ID names with SEQ ID NO:X. Thus, starting with an SEQ ID NO:X, one can use Tables 1A, 1B, and 4 to determine the corresponding Clone ID, which library it came from and which ATCC deposit the library is contained in. Furthermore, it is possible to retrieve a given cDNA clone from the source library by techniques known in the art and described elsewhere herein. The ATCC is located at 10801 University Boulevard, Manassas, Va. 20110-2209, USA. The ATCC deposits were made pursuant to the terms of the Budapest Treaty on the international recognition of the deposit of microorganisms for the purposes of patent procedure.

[0185] In specific embodiments, the polynucleotides of the invention are at least 15, at least 30, at least 50, at least 100, at least 125, at least 500, or at least 1000 continuous nucleotides but are less than or equal to 300 kb, 200 kb, 100 kb, 50 kb, 15 kb, 10 kb, 7.5 kb, 5 kb, 2.5 kb, 2.0 kb, or 1 kb, in length. In a further embodiment, polynucleotides of the invention comprise a portion of the coding sequences, as disclosed herein, but do not comprise all or a portion of any intron. In another embodiment, the polynucleotides comprising coding sequences do not contain coding sequences of a genomic flanking gene (i.e., 5′ or 3′ to the gene of interest in the genome). In other embodiments, the polynucleotides of the invention do not contain the coding sequence of more than 1000, 500, 250, 100, 50, 25, 20, 15, 10, 5, 4, 3, 2, or 1 genomic flanking gene(s).

[0186] A “polynucleotide” of the present invention also includes those polynucleotides capable of hybridizing, under stringent hybridization conditions, to sequences contained in SEQ ID NO:X, or the complement thereof (e.g., the complement of any one, two, three, four, or more of the polynucleotide fragments described herein), the polynucleotide sequence delineated in columns 7 and 8 of Table 1A or the complement thereof, the polynucleotide sequence delineated in columns 8 and 9 of Table 2 or the complement thereof, and/or cDNA sequences contained in Clone ID: (e.g., the complement of any one, two, three, four, or more of the polynucleotide fragments, or the cDNA clone within the pool of cDNA clones deposited with the ATCC, described herein). “Stringent hybridization conditions” refers to an overnight incubation at 42 degree C. in a solution comprising 50% formamide, 5×SSC (750 mM NaCl, 75 mM trisodium citrate), 50 mM sodium phosphate (pH 7.6), 5× Denhardt's solution, 10% dextran sulfate, and 20 μg/ml denatured, sheared salmon sperm DNA, followed by washing the filters in 0.1×SSC at about 65 degree C.

[0187] Also contemplated are nucleic acid molecules that hybridize to the polynucleotides of the present invention at lower stringency hybridization conditions. Changes in the stringency of hybridization and signal detection are primarily accomplished through the manipulation of formamide concentration (lower percentages of formamide result in lowered stringency); salt conditions, or temperature. For example, lower stringency conditions include an overnight incubation at 37 degree C. in a solution comprising 6×SSPE (20×SSPE=3M NaCl; 0.2M NaH₂PO₄; 0.02M EDTA, pH 7.4), 0.5% SDS, 30% formamide, 100 ug/ml salmon sperm blocking DNA; followed by washes at 50 degree C. with 1×SSPE, 0.1% SDS. In addition, to achieve even lower stringency, washes performed following stringent hybridization can be done at higher salt concentrations (e.g. 5×SSC).

[0188] Note that variations in the above conditions may be accomplished through the inclusion and/or substitution of alternate blocking reagents used to suppress background in hybridization experiments. Typical blocking reagents include Denhardt's reagent, BLOTTO, heparin, denatured salmon sperm DNA, and commercially available proprietary formulations. The inclusion of specific blocking reagents may require modification of the hybridization conditions described above, due to problems with compatibility.

[0189] Of course, a polynucleotide which hybridizes only to polyA+ sequences (such as any 3′ terminal polyA+ tract of a cDNA shown in the sequence listing), or to a complementary stretch of T (or U) residues, would not be included in the definition of “polynucleotide,” since such a polynucleotide would hybridize to any nucleic acid molecule containing a poly (A) stretch or the complement thereof (e.g., practically any double-stranded cDNA clone generated using oligo dT as a primer).

[0190] The polynucleotide of the present invention can be composed of any polyribonucleotide or polydeoxribonucleotide, which may be unmodified RNA or DNA or modified RNA or DNA. For example, polynucleotides can be composed of single- and double-stranded DNA, DNA that is a mixture of single- and double-stranded regions, single- and double-stranded RNA, and RNA that is mixture of single- and double-stranded regions, hybrid molecules comprising DNA and RNA that may be single-stranded or, more typically, double-stranded or a mixture of single- and double-stranded regions. In addition, the polynucleotide can be composed of triple-stranded regions comprising RNA or DNA or both RNA and DNA. A polynucleotide may also contain one or more modified bases or DNA or RNA backbones modified for stability or for other reasons. “Modified” bases include, for example, tritylated bases and unusual bases such as inosine. A variety of modifications can be made to DNA and RNA; thus, “polynucleotide” embraces chemically, enzymatically, or metabolically modified forms.

[0191] In specific embodiments, the polynucleotides of the invention are at least 15, at least 30, at least 50, at least 100, at least 125, at least 500, or at least 1000 continuous nucleotides but are less than or equal to 300 kb, 200 kb, 100 kb, 50 kb, 15 kb, 10 kb, 7.5 kb, 5 kb, 2.5 kb, 2.0 kb, or 1 kb, in length. In a further embodiment, polynucleotides of the invention comprise a portion of the coding sequences, as disclosed herein, but do not comprise all or a portion of any intron. In another embodiment, the polynucleotides comprising coding sequences do not contain coding sequences of a genomic flanking gene (i.e., 5′ or 3′ to the gene of interest in the genome). In other embodiments, the polynucleotides of the invention do not contain the coding sequence of more than 1000, 500, 250, 100, 50, 25, 20, 15, 10, 5, 4, 3, 2, or 1 genomic flanking gene(s).

[0192] “SEQ ID NO:X” refers to a polynucleotide sequence described in column 5 of Table 1A, while “SEQ ID NO:Y” refers to a polypeptide sequence described in column 11 of Table 1A. SEQ ID NO:X is identified by an integer specified in column 6 of Table 1A. The polypeptide sequence SEQ ID NO:Y is a translated open reading frame (ORF) encoded by polynucleotide SEQ ID NO:X. The polynucleotide sequences are shown in the sequence listing immediately followed by all of the polypeptide sequences. Thus, a polypeptide sequence corresponding to polynucleotide sequence SEQ ID NO:2 is the first polypeptide sequence shown in the sequence listing. The second polypeptide sequence corresponds to the polynucleotide sequence shown as SEQ ID NO:3, and so on.

[0193] The polypeptide of the present invention can be composed of amino acids joined to each other by peptide bonds or modified peptide bonds, i.e., peptide isosteres, and may contain amino acids other than the 20 gene-encoded amino acids. The polypeptides may be modified by either natural processes, such as posttranslational processing, or by chemical modification techniques which are well known in the art. Such modifications are well described in basic texts and in more detailed monographs, as well as in a voluminous research literature. Modifications can occur anywhere in a polypeptide, including the peptide backbone, the amino acid side-chains and the amino or carboxyl termini. It will be appreciated that the same type of modification may be present in the same or varying degrees at several sites in a given polypeptide. Also, a given polypeptide may contain many types of modifications. Polypeptides may be branched, for example, as a result of ubiquitination, and they may be cyclic, with or without branching. Cyclic, branched, and branched cyclic polypeptides may result from posttranslation natural processes or may be made by synthetic methods. Modifications include acetylation, acylation, ADP-ribosylation, amidation, covalent attachment of flavin, covalent attachment of a heme moiety, covalent attachment of a nucleotide or nucleotide derivative, covalent attachment of a lipid or lipid derivative, covalent attachment of phosphotidylinositol, cross-linking, cyclization, disulfide bond formation, demethylation, formation of covalent cross-links, formation of cysteine, formation of pyroglutamate, formylation, gamma-carboxylation, glycosylation, GPI anchor formation, hydroxylation, iodination, methylation, myristoylation, oxidation, pegylation, proteolytic processing, phosphorylation, prenylation, racemization, selenoylation, sulfation, transfer-RNA mediated addition of amino acids to proteins such as arginylation, and ubiquitination. (See, for instance, PROTEINS—STRUCTURE AND MOLECULAR PROPERTIES, 2nd Ed., T. E. Creighton, W. H. Freeman and Company, New York (1993); POSTTRANSLATIONAL COVALENT MODIFICATION OF PROTEINS, B. C. Johnson, Ed., Academic Press, New York, pgs. 1-12 (1983); Seifter et al., Meth. Enzymol. 182:626-646 (1990); Rattan et al., Ann. N.Y. Acad. Sci. 663:48-62 (1992)).

[0194] “SEQ ID NO:X” refers to a polynucleotide sequence described, for example, in Tables 1A, 1B or 2, while “SEQ ID NO:Y” refers to a polypeptide sequence described in column 11 of Table 1A and or column 6 of Table 1B. SEQ ID NO:X is identified by an integer specified in column 3 of Table 1B. The polypeptide sequence SEQ ID NO:Y is a translated open reading frame (ORF) encoded by polynucleotide SEQ ID NO:X. “Clone ID:” refers to a cDNA clone described in column 2 of Table 1A and/or 1B.

[0195] “A polypeptide having functional activity” refers to a polypeptide capable of displaying one or more known functional activities associated with a full-length (complete) protein. Such functional activities include, but are not limited to, biological activity, antigenicity [ability to bind (or compete with a polypeptide for binding) to an anti-polypeptide antibody], immunogenicity (ability to generate antibody which binds to a specific polypeptide of the invention), ability to form multimers with polypeptides of the invention, and ability to bind to a receptor or ligand for a polypeptide.

[0196] The polypeptides of the invention can be assayed for functional activity (e.g. biological activity) using or routinely modifying assays known in the art, as well as assays described herein. Specifically, one of skill in the art may routinely assay secreted polypeptides (including fragments and variants) of the invention for activity using assays as described in the examples section below.

[0197] “A polypeptide having biological activity” refers to a polypeptide exhibiting activity similar to, but not necessarily identical to, an activity of a polypeptide of the present invention, including mature forms, as measured in a particular biological assay, with or without dose dependency. In the case where dose dependency does exist, it need not be identical to that of the polypeptide, but rather substantially similar to the dose-dependence in a given activity as compared to the polypeptide of the present invention (i.e., the candidate polypeptide will exhibit greater activity or not more than about 25-fold less and, preferably, not more than about tenfold less activity, and most preferably, not more than about three-fold less activity relative to the polypeptide of the present invention).

### Description of the Tables

Description of Table 1A

[0198] Table 1A summarizes information concerning certain polynucleotides and polypeptides of the invention.

[0199] The first column provides the gene number in the application for each clone identifier.

[0200] The second column provides a unique clone identifier, “Clone ID:”, for a cDNA clone related to each contig sequence disclosed in Table 1A.

[0201] In the third column, the cDNA Clones identified in the second column were deposited as indicated (i.e., by ATCC Deposit Nr. and deposit date). Some of the deposits contain multiple different clones corresponding to the same gene.

[0202] In the fourth column, “Vector” refers to the type of vector contained in the corresponding cDNA Clone identified in the second column.

[0203] In the fifth column, the nucleotide sequence identified as “NT SEQ ID NO:X” was assembled from partially homologous (“overlapping”) sequences obtained from the corresponding cDNA clone identified in the second column and, in some cases, from additional related cDNA clones. The overlapping sequences were assembled into a single contiguous sequence of high redundancy (usually three to five overlapping sequences at each nucleotide position), resulting in a final sequence identified as SEQ ID NO:X.

[0204] The sixth column, “Total NT Seq.”, refers to the total number of nucleotides in the contig sequence identified as SEQ ID NO:X.”

[0205] The deposited clone may contain all or most of these sequences, reflected by the nucleotide position indicated as “5′ NT of Clone Seq.” (seventh column) and the “3′ NT of Clone Seq.” (eighth column) of SEQ ID NO:X.

[0206] In the ninth column, the nucleotide position of SEQ ID NO:X of the putative start codon (methionine) is identified as “5′ NT of Start Codon.”

[0207] Similarly, in column ten, the nucleotide position of SEQ ID NO:X of the predicted signal sequence is identified as “5′ NT of First AA of Signal Pep.”

[0208] In the eleventh column, the translated amino acid sequence, beginning with the methionine, is identified as “AA SEQ ID NO:Y,” although other reading frames can also be routinely translated using known molecular biology techniques. The polypeptides produced by these alternative open reading frames are specifically contemplated by the present invention.

[0209] In the twelfth and thirteenth columns of Table 1A, the first and last amino acid position of SEQ ID NO:Y of the predicted signal peptide is identified as “First AA of Sig Pep” and “Last AA of Sig Pep.”

[0210] In the fourteenth column, the predicted first amino acid position of SEQ ID NO:Y of the secreted portion is identified as “First AA of Secreted Portion”.

[0211] The amino acid position of SEQ ID NO:Y of the last amino acid encoded by the open reading frame is identified in the fifteenth column as “Last AA of ORF”.

[0212] SEQ ID NO:X (where X may be any of the polynucleotide sequences disclosed in the sequence listing) and the translated SEQ ID NO:Y (where Y may be any of the polypeptide sequences disclosed in the sequence listing) are sufficiently accurate and otherwise suitable for a variety of uses well known in the art and described further below. For instance, SEQ ID NO:X is useful for designing nucleic acid hybridization probes that will detect nucleic acid sequences contained in SEQ ID NO:X or the cDNA contained in the deposited clone. These probes will also hybridize to nucleic acid molecules in biological samples, thereby enabling a variety of forensic and diagnostic methods of the invention. Similarly, polypeptides identified from SEQ ID NO:Y may be used, for example, to generate antibodies which bind specifically to proteins containing the polypeptides and the secreted proteins encoded by the cDNA clones identified in Table 1A and/or elsewhere herein

[0213] Nevertheless, DNA sequences generated by sequencing reactions can contain sequencing errors. The errors exist as misidentified nucleotides, or as insertions or deletions of nucleotides in the generated DNA sequence. The erroneously inserted or deleted nucleotides cause frame shifts in the reading frames of the predicted amino acid sequence. In these cases, the predicted amino acid sequence diverges from the actual amino acid sequence, even though the generated DNA sequence may be greater than 99.9% identical to the actual DNA sequence (for example, one base insertion or deletion in an open reading frame of over 1000 bases).

[0214] Accordingly, for those applications requiring precision in the nucleotide sequence or the amino acid sequence, the present invention provides not only the generated nucleotide sequence identified as SEQ ID NO:X, and the predicted translated amino acid sequence identified as SEQ ID NO:Y, but also a sample of plasmid DNA containing a human cDNA of the invention deposited with the ATCC, as set forth in Table 1A. The nucleotide sequence of each deposited plasmid can readily be determined by sequencing the deposited plasmid in accordance with known methods

[0215] The predicted amino acid sequence can then be verified from such deposits. Moreover, the amino acid sequence of the protein encoded by a particular plasmid can also be directly determined by peptide sequencing or by expressing the protein in a suitable host cell containing the deposited human cDNA, collecting the protein, and determining its sequence. Also provided in Table 1A, is the name of the vector which contains the cDNA plasmid (fourth column). Each vector is routinely used in the art. The following additional information is provided for convenience.

[0216] Vectors Lambda Zap (U.S. Pat. Nos. 5,128,256 and 5,286,636), Uni-Zap XR (U.S. Pat. Nos. 5,128,256 and 5,286,636), Zap Express (U.S. Pat. Nos. 5,128,256 and 5,286,636), pBluescript (pBS) (Short, J. M. et al, Nucleic Acids Res. 16:7583-7600 (1988); Alting-Mees, M. A. and Short, J. M., Nucleic Acids Res. 17:9494 (1989)) and pBK (Alting-Mees, M. A. et al., Strategies 5:58-61 (1992)) are commercially available from Stratagene Cloning Systems, Inc., 11011 N. Torrey Pines Road, La Jolla, Calif., 92037. pBS contains an ampicillin resistance gene and pBK contains a neomycin resistance gene. Phagemid pBS may be excised from the Lambda Zap and Uni-Zap XR vectors, and phagemid pBK may be excised from the Zap Express vector. Both phagemids may be transformed into E. coli strain XL-1 Blue, also available from Stratagene

[0217] Vectors pSport1, pCMVSport 1.0, pCMVSport 2.0 and pCMVSport 3.0, were obtained from Life Technologies, Inc., P. O. Box 6009, Gaithersburg, Md. 20897. All Sport vectors contain an ampicillin resistance gene and may be transformed into E. coli strain DH10B, also available from Life Technologies. See, for instance, Gruber, C. E., et al., Focus 15:59 (1993). Vector lafmid BA (Bento Soares, Columbia University, New York, N.Y.) contains an ampicillin resistance gene and can be transformed into E. coli strain XL-1 Blue. Vector pCR®2.1, which is available from Invitrogen, 1600 Faraday Avenue, Carlsbad, Calif. 92008, contains an ampicillin resistance gene and may be transformed into E. coli strain DH10B, available from Life Technologies. See, for instance, Clark, J. M., Nuc. Acids Res. 16:9677-9686 (1988) and Mead, D. et al., Bio/Technology 9: (1991).

[0218] The present invention also relates to the genes corresponding to SEQ ID NO:X, SEQ ID NO:Y, and/or a deposited cDNA (cDNA Clone ID). The corresponding gene can be isolated in accordance with known methods using the sequence information disclosed herein. Such methods include, but are not limited to, preparing probes or primers from the disclosed sequence and identifying or amplifying the corresponding gene from appropriate sources of genomic material.

[0219] Also provided in the present invention are allelic variants, orthologs, and/or species homologs. Procedures known in the art can be used to obtain full-length genes, allelic variants, splice variants, full-length coding portions, orthologs, and/or species homologs of genes corresponding to SEQ ID NO:X and SEQ ID NO:Y using information from the sequences disclosed herein or the clones deposited with the ATCC. For example, allelic variants and/or species homologs may be isolated and identified by making suitable probes or primers from the sequences provided herein and screening a suitable nucleic acid source for allelic variants and/or the desired homologue.

[0220] The present invention provides a polynucleotide comprising, or alternatively consisting of, the nucleic acid sequence of SEQ ID NO:X and/or a cDNA contained in ATCC Deposit No.Z. The present invention also provides a polypeptide comprising, or alternatively, consisting of, the polypeptide sequence of SEQ ID NO:Y, a polypeptide encoded by SEQ ID NO:X, and/or a polypeptide encoded by a cDNA contained in ATCC deposit No.Z. Polynucleotides encoding a polypeptide comprising, or alternatively consisting of the polypeptide sequence of SEQ ID NO:Y, a polypeptide encoded by SEQ ID NO:X and/or a polypeptide encoded by the cDNA contained in ATCC Deposit No.Z, are also encompassed by the invention. The present invention further encompasses a polynucleotide comprising, or alternatively consisting of the complement of the nucleic acid sequence of SEQ ID NO:X, and/or the complement of the coding strand of the cDNA contained in ATCC Deposit No.Z.

TABLE 1A

| | | | | NT | | | | | 5′ NT | | First | Last | | |
|---|---|---|---|---|---|---|---|---|---|---|---|---|---|---|
| | | | | SEQ | | 5′ NT | 3′ NT | | of First | AA | AA | AA | First AA | |
| | | ATCC | | ID | Total | of | of | 5′ NT | AA of | SEQ | of | of | of | Last |
| Gene | cDNA | Deposit Nr | | NO: | NT | Clone | Clone | of Start | Signal | ID | Sig | Sig | Secreted | AA of |
| No. | Clone ID | and Date | Vector | X | Seq. | Seq. | Seq. | Codon | Pep | NO: Y | Pep | Pep | Portion | ORF |
| 1 | HSMPG12 | PTA-3680 | pCMVSport 3.0 | 11 | 1893 | 1 | 1893 | 104 | 104 | 204 | 1 | 40 | 41 | 88 |
| | | Aug. 30, 2001 | | | | | | | | | | | | |
| 1 | HSMPG12 | PTA-3680 | pCMVSport 3.0 | 100 | 2382 | 1 | 2382 | 119 | 119 | 293 | 1 | 40 | 41 | 88 |
| | | Aug. 30, 2001 | | | | | | | | | | | | |
| 2 | HNLJK11 | PTA-3680 | pSport1 | 12 | 993 | 1 | 993 | 276 | 276 | 205 | 1 | 35 | 36 | 210 |
| | | Aug. 30, 2001 | | | | | | | | | | | | |
| 2 | HNLJK11 | PTA-3680 | pSport1 | 101 | 1021 | 1 | 1021 | 305 | 305 | 294 | 1 | 35 | 36 | 210 |
| | | Aug. 30, 2001 | | | | | | | | | | | | |
| 3 | HSMPJ30 | PTA-3680 | pCMVSport 3.0 | 13 | 643 | 1 | 643 | 143 | 143 | 206 | 1 | 18 | 19 | 167 |
| | | Aug. 30, 2001 | | | | | | | | | | | | |
| 3 | HSMPJ30 | PTA-3680 | pCMVSport 3.0 | 102 | 1552 | 1 | 1552 | 156 | 156 | 295 | 1 | 18 | 19 | 365 |
| | | Aug. 30, 2001 | | | | | | | | | | | | |
| 3 | HSMPJ30 | PTA-3680 | pCMVSport 3.0 | 103 | 599 | 1 | 599 | | 155 | 296 | 1 | 1 | 2 | 99 |
| | | Aug. 30, 2001 | | | | | | | | | | | | |
| 4 | HTAOK88 | PTA-3680 | pCMVSport 3.0 | 14 | 1205 | 1 | 1205 | 85 | 85 | 207 | 1 | 24 | 25 | 196 |
| | | Aug. 30, 2001 | | | | | | | | | | | | |
| 4 | HTAOK88 | PTA-3680 | pCMVSport 3.0 | 104 | 1216 | 1 | 1216 | 97 | 97 | 297 | 1 | 24 | 25 | 196 |
| | | Aug. 30, 2001 | | | | | | | | | | | | |
| 4 | HTAOK88 | PTA-3680 | pCMVSport 3.0 | 105 | 3759 | 394 | 3759 | 478 | 478 | 298 | 1 | 24 | 25 | 196 |
| | | Aug. 30, 2001 | | | | | | | | | | | | |
| 5 | HDSIX96 | PTA-3680 | pCMVSport 3.0 | 15 | 537 | 1 | 537 | 91 | 91 | 208 | 1 | 29 | 30 | 84 |
| | | Aug. 30, 2001 | | | | | | | | | | | | |
| 5 | HDSIX96 | PTA-3680 | pCMVSport 3.0 | 106 | 485 | 1 | 485 | 91 | 91 | 299 | 1 | 29 | 30 | 84 |
| | | Aug. 30, 2001 | | | | | | | | | | | | |
| 5 | HDSIX96 | PTA-3680 | pCMVSport 3.0 | 107 | 499 | 1 | 499 | 103 | 103 | 300 | 1 | 29 | 30 | 84 |
| | | Aug. 30, 2001 | | | | | | | | | | | | |
| 5 | HDSIX96 | PTA-3680 | pCMVSport 3.0 | 108 | 499 | 1 | 499 | 103 | 103 | 301 | 1 | 29 | 30 | 84 |
| | | Aug. 30, 2001 | | | | | | | | | | | | |
| 5 | HDSIX96 | PTA-3680 | pCMVSport 3.0 | 109 | 180 | 1 | 180 | | 39 | 302 | 1 | 1 | 2 | 47 |
| | | Aug. 30, 2001 | | | | | | | | | | | | |
| 6 | HATYJ68 | PTA-3680 | pCMVSport 3.0 | 16 | 2826 | 26 | 2014 | 104 | 104 | 209 | 1 | 32 | 33 | 400 |
| | | Aug. 30, 2001 | | | | | | | | | | | | |
| 6 | HATYJ68 | PTA-3680 | pCMVSport 3.0 | 110 | 2015 | 1 | 2015 | 91 | 91 | 303 | 1 | 32 | 33 | 400 |
| | | Aug. 30, 2001 | | | | | | | | | | | | |
| 6 | HATYJ68 | PTA-3680 | pCMVSport 3.0 | 111 | 2044 | 26 | 2030 | 104 | 104 | 304 | 1 | 32 | 33 | 400 |
| | | Aug. 30, 2001 | | | | | | | | | | | | |
| 7 | HDSJH26 | PTA-3680 | pCMVSport 3.0 | 17 | 1508 | 1 | 1508 | 129 | 129 | 210 | 1 | 32 | 33 | 125 |
| | | Aug. 30, 2001 | | | | | | | | | | | | |
| 7 | HDSJH26 | PTA-3680 | pCMVSport 3.0 | 112 | 1509 | 1 | 1509 | 130 | 130 | 305 | 1 | 32 | 33 | 125 |
| | | Aug. 30, 2001 | | | | | | | | | | | | |
| 7 | HDSJH26 | PTA-3680 | pCMVSport 3.0 | 113 | 1497 | 1 | 1497 | 119 | 119 | 306 | 1 | 32 | 33 | 125 |
| | | Aug. 30, 2001 | | | | | | | | | | | | |
| 7 | HDSJH26 | PTA-3680 | pCMVSport 3.0 | 114 | 988 | 1 | 988 | | 85 | 307 | 1 | 21 | 22 | 65 |
| | | Aug. 30, 2001 | | | | | | | | | | | | |
| 8 | HNMIG09 | PTA-3680 | pCMVSport 3.0 | 18 | 1631 | 1 | 1631 | 176 | 176 | 211 | 1 | 27 | 28 | 294 |
| | | Aug. 30, 2001 | | | | | | | | | | | | |
| 8 | HNMIG09 | PTA-3680 | pCMVSport 3.0 | 115 | 1605 | 1 | 1605 | 149 | 149 | 308 | 1 | 27 | 28 | 294 |
| | | Aug. 30, 2001 | | | | | | | | | | | | |
| 9 | HLCMJ69 | PTA-3680 | Uni-ZAP XR | 19 | 1881 | 1 | 1881 | 88 | 88 | 212 | 1 | 25 | 26 | 283 |
| | | Aug. 30, 2001 | | | | | | | | | | | | |
| 9 | HLCMJ69 | PTA-3680 | Uni-ZAP XR | 116 | 1881 | 1 | 1849 | 76 | 76 | 309 | 1 | 25 | 26 | 283 |
| | | Aug. 30, 2001 | | | | | | | | | | | | |
| 10 | HNMIB80 | PTA-3680 | pCMVSport 3.0 | 20 | 2220 | 325 | 2220 | 465 | 465 | 213 | 1 | 34 | 35 | 396 |
| | | Aug. 30, 2001 | | | | | | | | | | | | |
| 11 | HDLLA60 | PTA-3680 | pCMVSport 3.0 | 21 | 2559 | 1 | 2559 | 117 | 117 | 214 | 1 | 27 | 28 | 672 |
| | | Aug. 30, 2001 | | | | | | | | | | | | |
| 11 | HDLLA60 | PTA-3680 | pCMVSport 3.0 | 117 | 2717 | 352 | 2460 | 268 | 268 | 310 | 1 | 27 | 28 | 672 |
| | | Aug. 30, 2001 | | | | | | | | | | | | |
| 11 | HDLLA60 | PTA-3680 | pCMVSport 3.0 | 118 | 1818 | 1 | 1818 | | 1142 | 311 | 1 | 9 | 10 | 10 |
| | | Aug. 30, 2001 | | | | | | | | | | | | |
| 12 | HDSIX56 | PTA-3680 | pCMVSport 3.0 | 22 | 1994 | 1 | 1994 | 33 | 33 | 215 | 1 | 29 | 30 | 160 |
| | | Aug. 30, 2001 | | | | | | | | | | | | |
| 12 | HDSIX56 | PTA-3680 | pCMVSport 3.0 | 119 | 1984 | 1 | 1984 | 22 | 22 | 312 | 1 | 29 | 30 | 160 |
| | | Aug. 30, 2001 | | | | | | | | | | | | |
| 12 | HDSIX56 | PTA-3680 | pCMVSport 3.0 | 120 | 1994 | 1 | 1994 | 33 | 33 | 313 | 1 | 29 | 30 | 160 |
| | | Aug. 30, 2001 | | | | | | | | | | | | |
| 13 | HFLEZ28 | PTA-3680 | pCMVSport 3.0 | 23 | 2208 | 1 | 923 | 160 | 160 | 216 | 1 | 39 | 40 | 215 |
| | | Aug. 30, 2001 | | | | | | | | | | | | |
| 13 | HFLEZ28 | PTA-3680 | pCMVSport 3.0 | 121 | 948 | 1 | 948 | 171 | 171 | 314 | 1 | 39 | 40 | 215 |
| | | Aug. 30, 2001 | | | | | | | | | | | | |
| 13 | HFLEZ28 | PTA-3680 | pCMVSport 3.0 | 122 | 923 | 1 | 923 | 160 | 160 | 315 | 1 | 39 | 40 | 215 |
| | | Aug. 30, 2001 | | | | | | | | | | | | |
| 13 | HFLEZ28 | PTA-3680 | pCMVSport 3.0 | 123 | 965 | 1 | 965 | 188 | 188 | 316 | 1 | 39 | 40 | 215 |
| | | Aug. 30, 2001 | | | | | | | | | | | | |
| 14 | HDMSA74 | PTA-3705 | pCMVSport 3.0 | 24 | 2244 | 8 | 2244 | 208 | 208 | 217 | 1 | 21 | 22 | 535 |
| | | Sep. 17, 2001 | | | | | | | | | | | | |
| 14 | HDMSA74 | PTA-3705 | pCMVSport 3.0 | 124 | 623 | 8 | 623 | 208 | 208 | 317 | 1 | 21 | 22 | 138 |
| | | Sep. 17, 2001 | | | | | | | | | | | | |
| 14 | HDMSA74 | PTA-3705 | pCMVSport 3.0 | 125 | 169 | 1 | 169 | | 2 | 318 | 1 | 1 | 2 | 56 |
| | | Sep. 17, 2001 | | | | | | | | | | | | |
| 15 | HDMSQ09 | PTA-3705 | pCMVSport 3.0 | 25 | 2138 | 1 | 2138 | 108 | 108 | 218 | 1 | 22 | 23 | 314 |
| | | Sep. 17, 2001 | | | | | | | | | | | | |
| 15 | HDMSQ09 | PTA-3705 | pCMVSport 3.0 | 126 | 832 | 1 | 832 | 92 | 92 | 319 | 1 | 22 | 23 | 230 |
| | | Sep. 17, 2001 | | | | | | | | | | | | |
| 15 | HDMSQ09 | PTA-3705 | pCMVSport 3.0 | 127 | 1334 | 642 | 1316 | | 113 | 320 | 1 | 1 | 2 | 145 |
| | | Sep. 17, 2001 | | | | | | | | | | | | |
| 16 | HDMTG72 | PTA-3705 | pCMVSport 3.0 | 26 | 466 | 1 | 466 | 46 | 46 | 219 | 1 | 43 | 44 | 97 |
| | | Sep. 17, 2001 | | | | | | | | | | | | |
| 16 | HDMTG72 | PTA-3705 | pCMVSport 3.0 | 128 | 543 | 64 | 543 | 93 | 93 | 321 | 1 | 43 | 44 | 97 |
| | | Sep. 17, 2001 | | | | | | | | | | | | |
| 17 | HTAOQ18 | PTA-3705 | pCMVSport 3.0 | 27 | 885 | 1 | 865 | 88 | 88 | 220 | 1 | 38 | 39 | 218 |
| | | Sep. 17, 2001 | | | | | | | | | | | | |
| 17 | HTAOQ18 | PTA-3705 | pCMVSport 3.0 | 129 | 876 | 1 | 876 | 100 | 100 | 322 | 1 | 38 | 39 | 218 |
| | | Sep. 17, 2001 | | | | | | | | | | | | |
| 18 | HLAPM62 | PTA-3705 | pCMVSport 3.0 | 28 | 659 | 1 | 659 | 213 | 213 | 221 | 1 | 16 | 17 | 83 |
| | | Sep. 17, 2001 | | | | | | | | | | | | |
| 18 | HLAPM62 | PTA-3705 | pCMVSport 3.0 | 130 | 640 | 1 | 640 | 197 | 197 | 323 | 1 | 16 | 17 | 83 |
| | | Sep. 17, 2001 | | | | | | | | | | | | |
| 19 | HDLWY45 | PTA-3705 | pCMVSport 3.0 | 29 | 2529 | 1 | 2529 | 108 | 108 | 222 | 1 | 27 | 28 | 672 |
| | | Sep. 17, 2001 | | | | | | | | | | | | |
| 19 | HDLWY45 | PTA-3705 | pCMVSport 3.0 | 131 | 2717 | 352 | 2717 | 268 | 268 | 324 | 1 | 27 | 28 | 672 |
| | | Sep. 17, 2001 | | | | | | | | | | | | |
| 19 | HDLWY45 | PTA-3705 | pCMVSport 3.0 | 132 | 413 | 1 | 413 | 25 | 25 | 325 | 1 | 12 | 13 | 34 |
| | | Sep. 17, 2001 | | | | | | | | | | | | |
| 20 | HDMKF05 | PTA-3705 | pCMVSport 3.0 | 30 | 385 | 1 | 385 | 27 | 27 | 223 | 1 | 19 | 20 | 109 |
| | | Sep. 17, 2001 | | | | | | | | | | | | |
| 20 | HDMKF05 | PTA-3705 | pCMVSport 3.0 | 133 | 451 | 83 | 451 | 93 | 93 | 326 | 1 | 19 | 20 | 109 |
| | | Sep. 17, 2001 | | | | | | | | | | | | |
| 21 | HDMRQ63 | PTA-3705 | pCMVSport 3.0 | 31 | 611 | 1 | 611 | 129 | 129 | 224 | 1 | 23 | 24 | 90 |
| | | Sep. 17, 2001 | | | | | | | | | | | | |
| 21 | HDMRQ63 | PTA-3705 | pCMVSport 3.0 | 134 | 579 | 1 | 579 | | 137 | 327 | 1 | 1 | 2 | 83 |
| | | Sep. 17, 2001 | | | | | | | | | | | | |
| 22 | HDMKE89 | PTA-3705 | pCMVSport 3.0 | 32 | 1224 | 1 | 1224 | 121 | 121 | 225 | 1 | 16 | 17 | 331 |
| | | Sep. 17, 2001 | | | | | | | | | | | | |
| 22 | HDMKE89 | PTA-3705 | pCMVSport 3.0 | 135 | 2069 | 32 | 1234 | 134 | 134 | 328 | 1 | 16 | 17 | 331 |
| | | Sep. 17, 2001 | | | | | | | | | | | | |
| 23 | HNMIK76 | PTA-3705 | pCMVSport 3.0 | 33 | 1233 | 1 | 1233 | 95 | 95 | 226 | 1 | 22 | 23 | 105 |
| | | Sep. 17, 2001 | | | | | | | | | | | | |
| 23 | HNMIK76 | PTA-3705 | pCMVSport 3.0 | 136 | 1227 | 1 | 1213 | 78 | 78 | 329 | 1 | 22 | 23 | 105 |
| | | Sep. 17, 2001 | | | | | | | | | | | | |
| 24 | HDHMA62 | PTA-3705 | pCMVSport 2.0 | 34 | 791 | 1 | 791 | 197 | 197 | 227 | 1 | 30 | 31 | 89 |
| | | Sep. 17, 2001 | | | | | | | | | | | | |
| 24 | HDHMA62 | PTA-3705 | pCMVSport 2.0 | 137 | 1022 | 551 | 1022 | 736 | 736 | 330 | 1 | 30 | 31 | 89 |
| | | Sep. 17, 2001 | | | | | | | | | | | | |
| 24 | HDHMA62 | PTA-3705 | pCMVSport 2.0 | 138 | 228 | 1 | 228 | | 2 | 331 | 1 | 1 | 2 | 49 |
| | | Sep. 17, 2001 | | | | | | | | | | | | |
| 25 | HDQDT24 | PTA-3705 | pCMVSport 3.0 | 35 | 1834 | 202 | 1800 | 62 | 62 | 228 | 1 | 21 | 22 | 205 |
| | | Sep. 17, 2001 | | | | | | | | | | | | |
| 25 | HDQDT24 | PTA-3705 | pCMVSport 3.0 | 139 | 932 | 202 | 932 | 62 | 62 | 332 | 1 | 21 | 22 | 205 |
| | | Sep. 17, 2001 | | | | | | | | | | | | |
| 25 | HDQDT24 | PTA-3705 | pCMVSport 3.0 | 140 | 1745 | 1064 | 1709 | | 2 | 333 | 1 | 1 | 2 | 556 |
| | | Sep. 17, 2001 | | | | | | | | | | | | |
| 25 | HDQDT24 | PTA-3705 | pCMVSport 3.0 | 141 | 627 | 51 | 627 | 109 | 109 | 334 | 1 | 21 | 22 | 173 |
| | | Sep. 17, 2001 | | | | | | | | | | | | |
| 26 | HEOOV77 | PTA-3705 | pSport1 | 36 | 3289 | 1 | 3289 | 68 | 68 | 229 | 1 | 16 | 17 | 697 |
| | | Sep. 17, 2001 | | | | | | | | | | | | |
| 26 | HEOOV77 | PTA-3705 | pSport1 | 142 | 1344 | 9 | 1344 | 52 | 52 | 335 | 1 | 16 | 17 | 127 |
| | | Sep. 17, 2001 | | | | | | | | | | | | |
| 26 | HEOOV77 | PTA-3705 | pSport1 | 143 | 1644 | 59 | 1644 | 115 | 115 | 336 | 1 | 16 | 17 | 346 |
| | | Sep. 17, 2001 | | | | | | | | | | | | |
| 26 | HEOOV77 | PTA-3705 | pSport1 | 144 | 3264 | 1 | 3264 | | 3 | 337 | 1 | 1 | 2 | 710 |
| | | Sep. 17, 2001 | | | | | | | | | | | | |
| 27 | HERHG93 | PTA-3705 | pCMVSport 3.0 | 37 | 923 | 121 | 923 | 193 | 193 | 230 | 1 | 26 | 27 | 146 |
| | | Sep. 17, 2001 | | | | | | | | | | | | |
| 27 | HERHG93 | PTA-3705 | pCMVSport 3.0 | 145 | 922 | 121 | 922 | 193 | 193 | 338 | 1 | 26 | 27 | 146 |
| | | Sep. 17, 2001 | | | | | | | | | | | | |
| 28 | HESXG41 | PTA-3705 | pCMVSport 3.0 | 38 | 655 | 1 | 655 | 97 | 97 | 231 | 1 | 31 | 32 | 110 |
| | | Sep. 17, 2001 | | | | | | | | | | | | |
| 28 | HESXG41 | PTA-3705 | pCMVSport 3.0 | 146 | 665 | 1 | 665 | 108 | 108 | 339 | 1 | 31 | 32 | 110 |
| | | Sep. 17, 2001 | | | | | | | | | | | | |
| 29 | HFKFO58 | PTA-3705 | Uni-ZAP XR | 39 | 975 | 1 | 975 | 49 | 49 | 232 | 1 | 27 | 28 | 168 |
| | | Sep. 17, 2001 | | | | | | | | | | | | |
| 29 | HFKFO58 | PTA-3705 | Uni-ZAP XR | 147 | 1142 | 129 | 1142 | 179 | 179 | 340 | 1 | 27 | 28 | 168 |
| | | Sep. 17, 2001 | | | | | | | | | | | | |
| 30 | HFPKB52 | PTA-3705 | Uni-ZAP XR | 40 | 1778 | 1 | 1778 | 31 | 31 | 233 | 1 | 29 | 30 | 186 |
| | | Sep. 17, 2001 | | | | | | | | | | | | |
| 30 | HFPKB52 | PTA-3705 | Uni-ZAP XR | 148 | 1148 | 25 | 1148 | 45 | 45 | 341 | 1 | 29 | 30 | 227 |
| | | Sep. 17, 2001 | | | | | | | | | | | | |
| 30 | HFPKB52 | PTA-3705 | Uni-ZAP XR | 149 | 1691 | 62 | 1691 | 24 | 24 | 342 | 1 | 29 | 30 | 57 |
| | | Sep. 17, 2001 | | | | | | | | | | | | |
| 30 | HFPKB52 | PTA-3705 | Uni-ZAP XR | 150 | 1719 | 1 | 682 | | 3 | 343 | 1 | 1 | 2 | 121 |
| | | Sep. 17, 2001 | | | | | | | | | | | | |
| 31 | HGARX38 | PTA-3705 | pSport1 | 41 | 516 | 1 | 516 | 79 | 79 | 234 | 1 | 18 | 19 | 146 |
| | | Sep. 17, 2001 | | | | | | | | | | | | |
| 32 | HMAGO59 | PTA-3705 | Uni-ZAP XR | 42 | 1319 | 89 | 722 | 100 | 100 | 235 | 1 | 24 | 25 | 93 |
| | | Sep. 17, 2001 | | | | | | | | | | | | |
| 32 | HMAGO59 | PTA-3705 | Uni-ZAP XR | 151 | 722 | 89 | 722 | 100 | 100 | 344 | 1 | 24 | 25 | 93 |
| | | Sep. 17, 2001 | | | | | | | | | | | | |
| 32 | HMAGO59 | PTA-3705 | Uni-ZAP XR | 152 | 1281 | 95 | 1281 | 62 | 62 | 345 | 1 | 24 | 25 | 93 |
| | | Sep. 17, 2001 | | | | | | | | | | | | |
| 32 | HMAGO59 | PTA-3705 | Uni-ZAP XR | 153 | 356 | 94 | 317 | | 129 | 346 | 1 | 1 | 2 | 48 |
| | | Sep. 17, 2001 | | | | | | | | | | | | |
| 33 | HMTSX03 | PTA-3705 | pCMVSport 3.0 | 43 | 1556 | 1 | 1556 | 23 | 23 | 236 | 1 | 25 | 26 | 491 |
| | | Sep. 17, 2001 | | | | | | | | | | | | |
| 33 | HMTSX03 | PTA-3705 | pCMVSport 3.0 | 154 | 624 | 1 | 624 | 6 | 6 | 347 | 1 | 25 | 26 | 206 |
| | | Sep. 17, 2001 | | | | | | | | | | | | |
| 34 | HMTUZ60 | PTA-3705 | pCMVSport 3.0 | 44 | 995 | 1 | 995 | 45 | 45 | 237 | 1 | 31 | 32 | 114 |
| | | Sep. 17, 2001 | | | | | | | | | | | | |
| 35 | HNFKC14 | PTA-3705 | Uni-ZAP XR | 45 | 408 | 1 | 408 | 143 | 143 | 238 | 1 | 15 | 16 | 88 |
| | | Sep. 17, 2001 | | | | | | | | | | | | |
| 35 | HNFKC14 | PTA-3705 | Uni-ZAP XR | 155 | 447 | 1 | 447 | 163 | 163 | 348 | 1 | 15 | 16 | 95 |
| | | Sep. 17, 2001 | | | | | | | | | | | | |
| 36 | HNSQN50 | PTA-3705 | pSport1 | 46 | 2097 | 1 | 2097 | 81 | 81 | 239 | 1 | 20 | 21 | 498 |
| | | Sep. 17, 2001 | | | | | | | | | | | | |
| 36 | HNSQN50 | PTA-3705 | pSport1 | 156 | 1050 | 56 | 1050 | 109 | 109 | 349 | 1 | 20 | 21 | 310 |
| | | Sep. 17, 2001 | | | | | | | | | | | | |
| 36 | HNSQN50 | PTA-3705 | pSport1 | 157 | 678 | 216 | 678 | | 236 | 350 | 1 | 1 | 2 | 99 |
| | | Sep. 17, 2001 | | | | | | | | | | | | |
| 37 | HNSUM63 | PTA-3705 | pSport1 | 47 | 1002 | 1 | 946 | 126 | 126 | 240 | 1 | 40 | 41 | 205 |
| | | Sep. 17, 2001 | | | | | | | | | | | | |
| 37 | HNSUM63 | PTA-3705 | pSport1 | 158 | 959 | 1 | 959 | 142 | 142 | 351 | 1 | 40 | 41 | 205 |
| | | Sep. 17, 2001 | | | | | | | | | | | | |
| 38 | HNSWV68 | PTA-3705 | pSport1 | 48 | 2139 | 1580 | 2139 | | 710 | 241 | 1 | 1 | 2 | 197 |
| | | Sep. 17, 2001 | | | | | | | | | | | | |
| 39 | HOC2T95 | PTA-3705 | pSport1 | 49 | 940 | 124 | 789 | 172 | 172 | 242 | 1 | 18 | 19 | 167 |
| | | Sep. 17, 2001 | | | | | | | | | | | | |
| 39 | HOC2T95 | PTA-3705 | pSport1 | 159 | 681 | 1 | 681 | 65 | 65 | 352 | 1 | 18 | 19 | 167 |
| | | Sep. 17, 2001 | | | | | | | | | | | | |
| 40 | HODNV05 | PTA-3705 | pSport1 | 50 | 705 | 1 | 705 | 86 | 86 | 243 | 1 | 36 | 37 | 88 |
| | | Sep. 17, 2001 | | | | | | | | | | | | |
| 40 | HODNV05 | PTA-3705 | pSport1 | 160 | 720 | 1 | 720 | 102 | 102 | 353 | 1 | 36 | 37 | 88 |
| | | Sep. 17, 2001 | | | | | | | | | | | | |
| 41 | HPDSA48 | PTA-3705 | pBluescript SK- | 51 | 1018 | 58 | 451 | | 45 | 244 | 1 | 7 | 8 | 30 |
| | | Sep. 17, 2001 | | | | | | | | | | | | |
| 41 | HPDSA48 | PTA-3705 | pBluescript SK- | 161 | 878 | 1 | 821 | 78 | 78 | 354 | 1 | 20 | 21 | 117 |
| | | Sep. 17, 2001 | | | | | | | | | | | | |
| 41 | HPDSA48 | PTA-3705 | pBluescript SK- | 162 | 843 | 1 | 843 | 78 | 78 | 355 | 1 | 20 | 21 | 117 |
| | | Sep. 17, 2001 | | | | | | | | | | | | |
| 42 | HSKIT24 | PTA-3705 | pBluescript | 52 | 2046 | 1 | 2046 | 30 | 30 | 245 | 1 | 21 | 22 | 533 |
| | | Sep. 17, 2001 | | | | | | | | | | | | |
| 42 | HSKIT24 | PTA-3705 | pBluescript | 163 | 609 | 1 | 609 | 20 | 20 | 356 | 1 | 21 | 22 | 196 |
| | | Sep. 17, 2001 | | | | | | | | | | | | |
| 42 | HSKIT24 | PTA-3705 | pBluescript | 164 | 1461 | 69 | 1461 | 90 | 90 | 357 | 1 | 21 | 22 | 457 |
| | | Sep. 17, 2001 | | | | | | | | | | | | |
| 42 | HSKIT24 | PTA-3705 | pBluescript | 165 | 829 | 122 | 797 | | 107 | 358 | 1 | 1 | 2 | 97 |
| | | Sep. 17, 2001 | | | | | | | | | | | | |
| 43 | HSVAA83 | PTA-3705 | Uni-ZAP XR | 53 | 1183 | 1 | 1183 | 102 | 102 | 246 | 1 | 28 | 29 | 245 |
| | | Sep. 17, 2001 | | | | | | | | | | | | |
| 43 | HSVAA83 | PTA-3705 | Uni-ZAP XR | 166 | 635 | 1 | 635 | 94 | 94 | 359 | 1 | 28 | 29 | 180 |
| | | Sep. 17, 2001 | | | | | | | | | | | | |
| 43 | HSVAA83 | PTA-3705 | Uni-ZAP XR | 167 | 1195 | 25 | 1195 | 119 | 119 | 360 | 1 | 28 | 29 | 112 |
| | | Sep. 17, 2001 | | | | | | | | | | | | |
| 43 | HSVAA83 | PTA-3705 | Uni-ZAP XR | 168 | 1055 | 25 | 1055 | 119 | 119 | 361 | 1 | 28 | 29 | 245 |
| | | Sep. 17, 2001 | | | | | | | | | | | | |
| 43 | HSVAA83 | PTA-3705 | Uni-ZAP XR | 169 | 1188 | 85 | 1188 | 118 | 118 | 362 | 1 | 28 | 29 | 245 |
| | | Sep. 17, 2001 | | | | | | | | | | | | |
| 44 | HUTJT76 | PTA-3705 | pSport1 | 54 | 1042 | 1 | 1042 | 31 | 31 | 247 | 1 | 43 | 44 | 307 |
| | | Sep. 17, 2001 | | | | | | | | | | | | |
| 44 | HUTJT76 | PTA-3705 | pSport1 | 170 | 425 | 1 | 425 | 14 | 14 | 363 | 1 | 43 | 44 | 137 |
| | | Sep. 17, 2001 | | | | | | | | | | | | |
| 44 | HUTJT76 | PTA-3705 | pSport1 | 171 | 1187 | 1 | 1187 | 14 | 14 | 364 | 1 | 43 | 44 | 307 |
| | | Sep. 17, 2001 | | | | | | | | | | | | |
| 45 | HUVHZ75 | PTA-3705 | Uni-ZAP XR | 55 | 2894 | 82 | 2798 | | 109 | 248 | 1 | 17 | 18 | 42 |
| | | Sep. 17, 2001 | | | | | | | | | | | | |
| 45 | HUVHZ75 | PTA-3705 | Uni-ZAP XR | 172 | 562 | 1 | 562 | | 199 | 365 | 1 | 1 | 2 | 57 |
| | | Sep. 17, 2001 | | | | | | | | | | | | |
| 46 | HVAQO59 | PTA-3705 | pSport1 | 56 | 749 | 1 | 749 | 67 | 67 | 249 | 1 | 40 | 41 | 227 |
| | | Sep. 17, 2001 | | | | | | | | | | | | |
| 46 | HVAQO59 | PTA-3705 | pSport1 | 173 | 822 | 107 | 822 | 96 | 96 | 366 | 1 | 39 | 40 | 54 |
| | | Sep. 17, 2001 | | | | | | | | | | | | |
| 47 | HWHPA16 | PTA-3705 | pCMVSport 3.0 | 57 | 425 | 1 | 425 | 26 | 26 | 250 | 1 | 22 | 23 | 85 |
| | | Sep. 17, 2001 | | | | | | | | | | | | |
| 47 | HWHPA16 | PTA-3705 | pCMVSport 3.0 | 174 | 398 | 6 | 355 | 20 | 20 | 367 | 1 | 22 | 23 | 85 |
| | | Sep. 17, 2001 | | | | | | | | | | | | |
| 48 | HYCAD48 | PTA-3705 | pCMVSport 3.0 | 58 | 1307 | 1 | 1307 | 70 | 70 | 251 | 1 | 17 | 18 | 334 |
| | | Sep. 17, 2001 | | | | | | | | | | | | |
| 48 | HYCAD48 | PTA-3705 | pCMVSport 3.0 | 175 | 1377 | 1 | 1377 | 59 | 59 | 368 | 1 | 17 | 18 | 334 |
| | | Sep. 17, 2001 | | | | | | | | | | | | |
| 49 | HHFZF42 | PTA-3705 | pCMVSport 3.0 | 59 | 476 | 1 | 476 | 188 | 188 | 252 | 1 | 27 | 28 | 96 |
| | | Sep. 17, 2001 | | | | | | | | | | | | |
| 49 | HHFZF42 | PTA-3705 | pCMVSport 3.0 | 176 | 482 | 1 | 406 | | 1 | 369 | 1 | 1 | 2 | 88 |
| | | Sep. 17, 2001 | | | | | | | | | | | | |
| 50 | HHAQY41 | PTA-3705 | pCMVSport 3.0 | 60 | 597 | 110 | 597 | 217 | 217 | 253 | 1 | 19 | 20 | 82 |
| | | Sep. 17, 2001 | | | | | | | | | | | | |
| 50 | HHAQY41 | PTA-3705 | pCMVSport 3.0 | 177 | 498 | 1 | 498 | 119 | 119 | 370 | 1 | 19 | 20 | 82 |
| | | Sep. 17, 2001 | | | | | | | | | | | | |
| 51 | HNSRC60 | PTA-3705 | pSport1 | 61 | 1594 | 1 | 1594 | 174 | 174 | 254 | 1 | 20 | 21 | 217 |
| | | Sep. 17, 2001 | | | | | | | | | | | | |
| 51 | HNSRC60 | PTA-3705 | pSport1 | 178 | 631 | 1 | 631 | 158 | 158 | 371 | 1 | 20 | 21 | 136 |
| | | Sep. 17, 2001 | | | | | | | | | | | | |
| 51 | HNSRC60 | PTA-3705 | pSport1 | 179 | 2914 | 182 | 760 | | 2161 | 372 | 1 | 1 | 2 | 78 |
| | | Sep. 17, 2001 | | | | | | | | | | | | |
| 52 | HFDUT84 | PTA-3705 | pSport1 | 62 | 1202 | 1 | 1202 | 92 | 92 | 255 | 1 | 33 | 34 | 107 |
| | | Sep. 17, 2001 | | | | | | | | | | | | |
| 52 | HFDUT84 | PTA-3705 | pSport1 | 180 | 1003 | 251 | 1003 | 331 | 331 | 373 | 1 | 33 | 34 | 107 |
| | | Sep. 17, 2001 | | | | | | | | | | | | |
| 53 | HHAIS21 | PTA-3705 | pCMVSport 3.0 | 63 | 894 | 1 | 894 | 111 | 111 | 256 | 1 | 49 | 50 | 146 |
| | | Sep. 17, 2001 | | | | | | | | | | | | |
| 53 | HHAIS21 | PTA-3705 | pCMVSport 3.0 | 181 | 604 | 1 | 604 | 94 | 94 | 374 | 1 | 49 | 50 | 146 |
| | | Sep. 17, 2001 | | | | | | | | | | | | |
| 54 | HHMQL78 | PTA-3705 | pSport1 | 64 | 972 | 1 | 972 | 139 | 139 | 257 | 1 | 43 | 44 | 205 |
| | | Sep. 17, 2001 | | | | | | | | | | | | |
| 54 | HHMQL78 | PTA-3705 | pSport1 | 182 | 1361 | 412 | 1361 | 538 | 538 | 375 | 1 | 43 | 44 | 205 |
| | | Sep. 17, 2001 | | | | | | | | | | | | |
| 55 | HNSMZ53 | PTA-3705 | pSport1 | 65 | 726 | 1 | 726 | 52 | 52 | 258 | 1 | 32 | 33 | 153 |
| | | Sep. 17, 2001 | | | | | | | | | | | | |
| 55 | HNSMZ53 | PTA-3705 | pSport1 | 183 | 426 | 1 | 426 | 52 | 52 | 376 | 1 | 32 | 33 | 125 |
| | | Sep. 17, 2001 | | | | | | | | | | | | |
| 56 | HNGMJ63 | PTA-3705 | Uni-ZAP XR | 66 | 1753 | 1 | 1753 | 40 | 40 | 259 | 1 | 26 | 27 | 99 |
| | | Sep. 17, 2001 | | | | | | | | | | | | |
| 56 | HNGMJ63 | PTA-3705 | Uni-ZAP XR | 184 | 627 | 1 | 627 | 33 | 33 | 377 | 1 | 26 | 27 | 99 |
| | | Sep. 17, 2001 | | | | | | | | | | | | |
| 57 | HNSIT44 | PTA-3705 | pSport1 | 67 | 1079 | 1 | 1079 | 124 | 124 | 260 | 1 | 23 | 24 | 171 |
| | | Sep. 17, 2001 | | | | | | | | | | | | |
| 57 | HNSIT44 | PTA-3705 | pSport1 | 185 | 528 | 1 | 528 | 124 | 124 | 378 | 1 | 23 | 24 | 135 |
| | | Sep. 17, 2001 | | | | | | | | | | | | |
| 58 | HHMSF21 | PTA-3705 | pSport1 | 68 | 507 | 1 | 507 | 135 | 135 | 261 | 1 | 33 | 34 | 82 |
| | | Sep. 17, 2001 | | | | | | | | | | | | |
| 58 | HHMSF21 | PTA-3705 | pSport1 | 186 | 522 | 1 | 522 | 152 | 152 | 379 | 1 | 33 | 34 | 82 |
| | | Sep. 17, 2001 | | | | | | | | | | | | |
| 59 | HNSES94 | PTA-3705 | pSport1 | 69 | 580 | 1 | 580 | 271 | 271 | 262 | 1 | 47 | 48 | 103 |
| | | Sep. 17, 2001 | | | | | | | | | | | | |
| 59 | HNSES94 | PTA-3705 | pSport1 | 187 | 1491 | 877 | 1472 | | 152 | 380 | 1 | 1 | 2 | 370 |
| | | Sep. 17, 2001 | | | | | | | | | | | | |
| 60 | HH1MU43 | PTA-3705 | pCMVSport 3.0 | 70 | 1386 | 1 | 1386 | 30 | 30 | 263 | 1 | 21 | 22 | 100 |
| | | Sep. 17, 2001 | | | | | | | | | | | | |
| 60 | HH1MU43 | PTA-3705 | pCMVSport 3.0 | 188 | 725 | 1 | 725 | 12 | 12 | 381 | 1 | 21 | 22 | 100 |
| | | Sep. 17, 2001 | | | | | | | | | | | | |
| 60 | HH1MU43 | PTA-3705 | pCMVSport 3.0 | 189 | 616 | 1 | 616 | | 439 | 382 | 1 | 1 | 2 | 59 |
| | | Sep. 17, 2001 | | | | | | | | | | | | |
| 61 | HHMNV67 | PTA-3705 | pSport1 | 71 | 813 | 176 | 793 | 233 | 233 | 264 | 1 | 20 | 21 | 151 |
| | | Sep. 17, 2001 | | | | | | | | | | | | |
| 61 | HHMNV67 | PTA-3705 | pSport1 | 190 | 677 | 1 | 677 | 70 | 70 | 383 | 1 | 20 | 21 | 151 |
| | | Sep. 17, 2001 | | | | | | | | | | | | |
| 61 | HHMNV67 | PTA-3705 | pSport1 | 191 | 835 | 176 | 835 | 233 | 233 | 384 | 1 | 20 | 21 | 151 |
| | | Sep. 17, 2001 | | | | | | | | | | | | |
| 62 | HMTSU69 | PTA-3705 | pCMVSport 3.0 | 72 | 757 | 107 | 669 | 112 | 112 | 265 | 1 | 20 | 21 | 142 |
| | | Sep. 17, 2001 | | | | | | | | | | | | |
| 62 | HMTSU69 | PTA-3705 | pCMVSport 3.0 | 192 | 713 | 1 | 713 | 17 | 17 | 385 | 1 | 20 | 21 | 142 |
| | | Sep. 17, 2001 | | | | | | | | | | | | |
| 62 | HMTSU69 | PTA-3705 | pCMVSport 3.0 | 193 | 541 | 1 | 541 | 6 | 6 | 386 | 1 | 20 | 21 | 142 |
| | | Sep. 17, 2001 | | | | | | | | | | | | |
| 63 | HMWCU24 | PTA-3705 | Uni-ZAP XR | 73 | 1734 | 1 | 1734 | 148 | 148 | 266 | 1 | 18 | 19 | 450 |
| | | Sep. 17, 2001 | | | | | | | | | | | | |
| 63 | HMWCU24 | PTA-3705 | Uni-ZAP XR | 194 | 543 | 1 | 543 | 140 | 140 | 387 | 1 | 18 | 19 | 134 |
| | | Sep. 17, 2001 | | | | | | | | | | | | |
| 63 | HMWCU24 | PTA-3705 | Uni-ZAP XR | 195 | 1859 | 290 | 1859 | 176 | 176 | 388 | 1 | 18 | 19 | 450 |
| | | Sep. 17, 2001 | | | | | | | | | | | | |
| 63 | HMWCU24 | PTA-3705 | Uni-ZAP XR | 196 | 594 | 1 | 594 | | 1 | 389 | 1 | 1 | 2 | 125 |
| | | Sep. 17, 2001 | | | | | | | | | | | | |
| 64 | HCPC191 | PTA-3845 | pCMVSport 3.0 | 74 | 1743 | 132 | 1743 | 401 | 401 | 267 | 1 | 30 | 31 | 266 |
| | | Nov. 8, 2001 | | | | | | | | | | | | |
| 65 | HDMSA08 | PTA-3845 | pCMVSport 3.0 | 75 | 1404 | 702 | 1361 | | 591 | 268 | 1 | 1 | 2 | 146 |
| | | Nov. 8, 2001 | | | | | | | | | | | | |
| 66 | HCPBA16 | PTA-3845 | pCMVSport 3.0 | 76 | 1803 | 146 | 1803 | 134 | 134 | 269 | 1 | 28 | 29 | 263 |
| | | Nov. 8, 2001 | | | | | | | | | | | | |
| 67 | HCPBM77 | PTA-3845 | pCMVSport 3.0 | 77 | 4165 | 2437 | 3065 | 52 | 52 | 270 | 1 | 23 | 24 | 950 |
| | | Nov. 8, 2001 | | | | | | | | | | | | |
| 68 | HCPBR37 | PTA-3845 | pCMVSport 3.0 | 78 | 603 | 1 | 603 | 144 | 144 | 271 | 1 | 21 | 22 | 127 |
| | | Nov. 8, 2001 | | | | | | | | | | | | |
| 68 | HCPBR37 | PTA-3845 | pCMVSport 3.0 | 197 | 651 | 1 | 651 | | 2 | 390 | 1 | 1 | 2 | 75 |
| | | Nov. 8, 2001 | | | | | | | | | | | | |
| 69 | HIEAG70 | PTA-3845 | pCMVSport 3.0 | 79 | 708 | 1 | 708 | 29 | 29 | 272 | 1 | 19 | 20 | 94 |
| | | Nov. 8, 2001 | | | | | | | | | | | | |
| 70 | HDMTL77 | PTA-3845 | pCMVSport 3.0 | 80 | 2415 | 1 | 2415 | 316 | 316 | 273 | 1 | 21 | 22 | 312 |
| | | Nov. 8, 2001 | | | | | | | | | | | | |
| 71 | HDMTP20 | PTA-3845 | pCMVSport 3.0 | 81 | 1230 | 71 | 1230 | 338 | 338 | 274 | 1 | 26 | 27 | 237 |
| | | Nov. 8, 2001 | | | | | | | | | | | | |
| 71 | HDMTP20 | PTA-3845 | pCMVSport 3.0 | 198 | 1292 | 819 | 1292 | 30 | 30 | 391 | 1 | 1 | 2 | 321 |
| | | Nov. 8, 2001 | | | | | | | | | | | | |
| 72 | HIEAP38 | PTA-3845 | pCMVSport 3.0 | 82 | 623 | 1 | 623 | 278 | 278 | 275 | 1 | 32 | 33 | 104 |
| | | Nov. 8, 2001 | | | | | | | | | | | | |
| 72 | HIEAP38 | PTA-3845 | pCMVSport 3.0 | 199 | 4476 | 2189 | 2878 | | 509 | 392 | 1 | 1 | 2 | 449 |
| | | Nov. 8, 2001 | | | | | | | | | | | | |
| 73 | HIEBT86 | PTA-3845 | pCMVSport 3.0 | 83 | 638 | 1 | 638 | 296 | 296 | 276 | 1 | 34 | 35 | 82 |
| | | Nov. 8, 2001 | | | | | | | | | | | | |
| 74 | HIGAN47 | PTA-3845 | pCMVSport 3.0 | 84 | 653 | 1 | 653 | 33 | 33 | 277 | 1 | 17 | 18 | 181 |
| | | Nov. 8, 2001 | | | | | | | | | | | | |
| 75 | HDMSW74 | PTA-3845 | pCMVSport 3.0 | 85 | 928 | 26 | 928 | 244 | 244 | 278 | 1 | 28 | 29 | 90 |
| | | Nov. 8, 2001 | | | | | | | | | | | | |
| 76 | HIGBG18 | PTA-3845 | pCMVSport 3.0 | 86 | 1141 | 1 | 1141 | 71 | 71 | 279 | 1 | 20 | 21 | 217 |
| | | Nov. 8, 2001 | | | | | | | | | | | | |
| 77 | HDMTE62 | PTA-3845 | pCMVSport 3.0 | 87 | 1874 | 4 | 1874 | 90 | 90 | 280 | 1 | 21 | 22 | 89 |
| | | Nov. 8, 2001 | | | | | | | | | | | | |
| 77 | HDMTE62 | PTA-3845 | pCMVSport 3.0 | 200 | 682 | 260 | 550 | | 187 | 393 | 1 | 1 | 2 | 62 |
| | | Nov. 8, 2001 | | | | | | | | | | | | |
| 78 | HCPRA19 | PTA-3845 | pCMVSport 3.0 | 88 | 751 | 1 | 751 | 52 | 52 | 281 | 1 | 42 | 43 | 233 |
| | | Nov. 8, 2001 | | | | | | | | | | | | |
| 78 | HCPRA19 | PTA-3845 | pCMVSport 3.0 | 201 | 671 | 1 | 667 | | 132 | 394 | 1 | 1 | 2 | 42 |
| | | Nov. 8, 2001 | | | | | | | | | | | | |
| 79 | HCPCB26 | PTA-3845 | pCMVSport 3.0 | 89 | 1080 | 21 | 1080 | 279 | 279 | 282 | 1 | 23 | 24 | 150 |
| | | Nov. 8, 2001 | | | | | | | | | | | | |
| 80 | HCPCN28 | PTA-3845 | pCMVSport 3.0 | 90 | 1587 | 25 | 1587 | 103 | 103 | 283 | 1 | 18 | 19 | 205 |
| | | Nov. 8, 2001 | | | | | | | | | | | | |
| 81 | HABCP53 | PTA-3845 | pCMVSport 3.0 | 91 | 716 | 87 | 686 | 96 | 96 | 284 | 1 | 18 | 19 | 86 |
| | | Nov. 8, 2001 | | | | | | | | | | | | |
| 82 | HCPBO66 | PTA-3845 | pCMVSport 3.0 | 92 | 1216 | 23 | 1216 | 119 | 119 | 285 | 1 | 28 | 29 | 245 |
| | | Nov. 8, 2001 | | | | | | | | | | | | |
| 82 | HCPBO66 | PTA-3845 | pCMVSport 3.0 | 202 | 1088 | 963 | 1025 | | 142 | 395 | 1 | 1 | 2 | 193 |
| | | Nov. 8, 2001 | | | | | | | | | | | | |
| 83 | HIGAT14 | PTA-3845 | pCMVSport 3.0 | 93 | 542 | 1 | 542 | 30 | 30 | 286 | 1 | 17 | 18 | 112 |
| | | Nov. 8, 2001 | | | | | | | | | | | | |
| 84 | HESYT64 | PTA-3845 | pCMVSport 3.0 | 94 | 1199 | 1 | 1199 | 417 | 417 | 287 | 1 | 20 | 21 | 106 |
| | | Nov. 8, 2001 | | | | | | | | | | | | |
| 85 | HALJC43 | PTA-3845 | pSport1 | 95 | 844 | 1 | 516 | 276 | 276 | 288 | 1 | 25 | 26 | 63 |
| | | Nov. 8, 2001 | | | | | | | | | | | | |
| 86 | HESZO72 | PTA-3845 | pCMVSport 3.0 | 96 | 614 | 1 | 614 | 98 | 98 | 289 | 1 | 26 | 27 | 114 |
| | | Nov. 8, 2001 | | | | | | | | | | | | |
| 87 | HESZV10 | PTA-3845 | pCMVSport 3.0 | 97 | 628 | 1 | 628 | 115 | 115 | 290 | 1 | 18 | 19 | 123 |
| | | Nov. 8, 2001 | | | | | | | | | | | | |
| 88 | HESYL64 | PTA-3845 | pCMVSport 3.0 | 98 | 634 | 1 | 634 | 80 | 80 | 291 | 1 | 27 | 28 | 185 |
| | | Nov. 8, 2001 | | | | | | | | | | | | |
| 88 | HESYL64 | PTA-3845 | pCMVSport 3.0 | 203 | 838 | 197 | 838 | | 196 | 396 | 1 | 1 | 2 | 186 |
| | | Nov. 8, 2001 | | | | | | | | | | | | |
| 89 | HESYN37 | PTA-3845 | pCMVSport 3.0 | 99 | 730 | 1 | 730 | 232 | 232 | 292 | 1 | 40 | 41 | 81 |
| | | Nov. 8, 2001 | | | | | | | | | | | | |

[0221] Description of Table 1B

[0222] Table 1B summarizes some of the polynucleotides encompassed by the invention (including cDNA clones related to the sequences (Clone ID:), contig sequences (contig identifier (Contig ID:) and contig nucleotide sequence identifiers (SEQ ID NO:X)) and further summarizes certain characteristics of these polynucleotides and the polypeptides encoded thereby.

[0223] The first column of Table 1B provide the gene numbers in the application for each clone identifier.

[0224] The second column of Table 1B provide unique clone identifiers, “Clone ID:”, for cDNA clones related to each contig sequence disclosed in Table 1A and/or Table 1B. This Clone ID references the cDNA clone which contains at least the 5′ most sequence of the assembled contig and at least a portion of SEQ ID NO:X as determined by directly sequencing the referenced clone. The referenced clone may have more sequence than described in the sequence listing or the clone may have less. In the vast majority of cases, however, the clone is believed to encode a full-length polypeptide. In the case where a clone is not full-length, a full-length cDNA can be obtained by methods described elsewhere herein.

[0225] The third column of Table 1B provide unique contig identifiers, “Contig ID:” for each of the contig sequences disclosed in these tables.

[0226] The fourth column of Table 1B provides the sequence identifiers, “SEQ ID NO:X”, for each of the contig sequences disclosed in Table 1A and/or 1B.

[0227] The fifth column of Table 1B, “ORF (From-To)”, provides the location (i.e., nucleotide position numbers) within the polynucleotide sequence of SEQ ID NO:X that delineates the preferred open reading frame (ORF) that encodes the amino acid sequence shown in the sequence listing and referenced in Table 1B as SEQ ID NO:Y (column 6). Where the nucleotide position number “To” is lower than the nucleotide position number “From”, the preferred ORF is the reverse complement of the referenced polynucleotide sequence.

[0228] The sixth column in Table 1B provides the corresponding SEQ ID NO:Y for the polypeptide sequence encoded by the preferred ORF delineated in column 5. In one embodiment, the invention provides an amino acid sequence comprising, or alternatively consisting of, a polypeptide encoded by the portion of SEQ ID NO:X delineated by “ORF (From-To)”. Also provided are polynucleotides encoding such amino acid sequences and the complementary strand thereto.

[0229] Column 7 of Table 1B lists residues comprising predicted epitopes contained in the polypeptides encoded by each of the preferred ORFs (SEQ ID NO:Y). Identification of potential immunogenic regions was performed according to the method of Jameson and Wolf (CABIOS, 4; 181-186 (1988)); specifically, the Genetics Computer Group (GCG) implementation of this algorithm, embodied in the program PEPTIDESTRUCTURE (Wisconsin Package v10.0, Genetics Computer Group (GCG), Madison, Wis.) The Jameson-Wolf antigenic analysis was performed using the computer program PROTEAN (Version 3.11 for the Power MacIntosh, DNASTAR, Inc., 1228 South Park Street Madison, Wis.). This method returns a measure of the probability that a given residue is found on the surface of the protein. Regions where the antigenic index score is greater than 0.9 over at least 6 amino acids are indicated in Table 1B as “Predicted Epitopes”. In particular embodiments, polypeptides of the invention comprise, or alternatively consist of, one, two, three, four, five or more of the predicted epitopes described in Table 1B. It will be appreciated that, depending on the analytical criteria used to predict antigenic determinants, the exact address of the determinant may vary slightly.

[0230] Column 8 of Table 1B provides an expression profile and library code:count for each of the contig sequences (SEQ ID NO:X) disclosed in Table 1B, which can routinely be combined with the information provided in Table 4 and used to determine the tissues, cells, and/or cell line libraries which predominantly express the polynucleotides of the invention. The first code number shown in Table 1B column 8 (preceding the colon), represents the tissue/cell source identifier code corresponding to the key provided in Table 4. Expression of these polynucleotides was not observed in the other tissues and/or cell libraries tested. The second number in column 8 (following the colon), represents the number of times a sequence corresponding to the reference polynucleotide sequence (e.g., SEQ ID NO:X) was identified in the corresponding tissue/cell source. Utilizing this technology, cDNAs were amplified by PCR and then transferred, in duplicate, onto the array. Gene expression was assayed through hybridization of first strand cDNA probes to the DNA array. cDNA probes were generated from total RNA extracted from a variety of different tissues and cell lines. Probe synthesis was performed in the presence of ³³P dCTP, using oligo(dT) to prime reverse transcription. After hybridization, high stringency washing conditions were employed to remove non-specific hybrids from the array. The remaining signal, emanating from each gene target, was measured using a Phosphorimager. Gene expression was reported as Phosphor Stimulating Luminescence (PSL) which reflects the level of phosphor signal generated from the probe hybridized to each of the gene targets represented on the array. A local background signal subtraction was performed before the total signal generated from each array was used to normalize gene expression between the different hybridizations. The value presented after “[array code]:” represents the mean of the duplicate values, following background subtraction and probe normalization. One of skill in the art could routinely use this information to identify normal and/or diseased tissue(s), which show a predominant expression pattern of the corresponding polynucleotide of the invention or to identify polynucleotides which show predominant and/or specific tissue and/or cell expression.

[0231] Column 9 of Table 1B (“Cytologic Band”) provides a chromosomal location for certain polynucleotides corresponding to SEQ ID NO:X. Chromosomal location was determined by finding exact matches to EST and cDNA sequences contained in the NCBI (National Center for Biotechnology Information) UniGene database. Each sequence in the UniGene database is assigned to a “cluster”; all of the ESTs, cDNAs, and STSs in a cluster are believed to be derived from a single gene. Chromosomal mapping data is often available for one or more sequence(s) in a UniGene cluster; this data (if consistent) is then applied to the cluster as a whole. Thus, it is possible to infer the chromosomal location of a new polynucleotide sequence by determining its identity with a mapped UniGene cluster. A modified version of the computer program BLASTN (Altshul, et al., J. Mol. Biol. 215:403-410 (1990), and Gish and States, Nat. Genet. 3:266-272) (1993) was used to search the UniGene database for EST or cDNA sequences that contain exact or near-exact matches to a polynucleotide sequence of the invention (the ‘Query’). A sequence from the UniGene database (the ‘Subject’) was said to be an exact match if it contained a segment of 50 nucleotides in length such that 48 of those nucleotides were in the same order as found in the Query sequence. If all of the matches that met this criteria were in the same UniGene cluster, and mapping data was available for this cluster, it is indicated in Table 1B under the heading “Cytologic Band”. Where a cluster had been further localized to a distinct cytologic band, that band is disclosed; where no banding information was available, but the gene had been localized to a single chromosome, the chromosome is disclosed.

[0232] Given a presumptive chromosomal location, disease locus association was determined by comparison with the Morbid Map, derived from Online Mendelian Inheritance in Man (Online Mendelian Inheritance in Man, OMIM™. McKusick-Nathans Institute for Genetic Medicine, Johns Hopkins University (Baltimore, Md.) and National Center for Biotechnology Information, National Library of Medicine (Bethesda, Md.) 2000. World Wide Web URL: http://www.ncbi.nlm.nih.gov/omim/). If the putative chromosomal location of the Query overlaps with the chromosomal location of a Morbid Map entry, an OMIM identification number is disclosed in Table 1B, column 10, labeled “OMIM Disease Reference(s)”. A key to the OMIM reference identification numbers, as well as a description of the associated disease, are provided in Table 5.

TABLE 1B

| | | | | | AA | | | | |
|---|---|---|---|---|---|---|---|---|---|
| | | | SEQ | | SEQ | | Tissue Distribution | | |
| | | | ID | | ID | | Library code: count | | OMIM |
| Gene | cDNA | Contig | NO: | ORF | NO: | | (see Table IV for Library | Cytologic | Disease |
| No: | Clone ID | ID: | X | (From-To) | Y | Predicted Epitopes | Codes) | Band | Reference(s): |
| 1 | HSMPG12 | 1292274 | 11 | 104-370 | 204 | Ser-66 to Pro-84. | H0644: 2, H0575: 1, | | |
| | | | | | | | H0510: 1, L0769: 1, L0659: | | |
| | | | | | | | 1, H0726: 1 and L0777: 1. | | |
| | HSMPG12 | 1292610 | 100 | 119-385 | 293 | Ser-66 to Pro-84. | | | |
| 2 | HNLJK11 | 1289619 | 12 | 276-908 | 205 | Ser-12 to Arg-17, | S0438: 1 | | |
| | | | | | | Arg-202 to Ala-210. | | | |
| | HNLJK11 | 1290053 | 101 | 305-937 | 294 | Ser-12 to Arg-17, | | | |
| | | | | | | Arg-202 to Ala-210. | | | |
| 3 | HSMPJ30 | 1289642 | 13 | 143-643 | 206 | Ser-16 to Lys-24, | L0804: 1 and H0726: 1. | | |
| | | | | | | Thr-31 to Glu-49. | | | |
| | HSMPJ30 | 1292609 | 102 | 156-1253 | 295 | Ser-16 to Lys-24, | | | |
| | | | | | | Thr-31 to Glu-49, | | | |
| | | | | | | Pro-253 to Asp-262, | | | |
| | | | | | | Arg-346 to Gln-358. | | | |
| | HSMPJ30 | 1289183 | 103 | 155-451 | 296 | His-6 to Gln-15, | | | |
| | | | | | | Pro-22 to Gln-30, | | | |
| | | | | | | Lys-58 to Val-81. | | | |
| 4 | HTAOK88 | 1312306 | 14 | 85-675 | 207 | | L0777: 8, L0766: 7, L0741: | | |
| | | | | | | | 7, L0439: 7, L0748: 5, | | |
| | | | | | | | L0754: 5, L0744: 4, L0757: | | |
| | | | | | | | 4, S0192: 4, H0677: 4, | | |
| | | | | | | | H0556: 3, S0360: 3, S0410: | | |
| | | | | | | | 3, H0013: 3, H0052: 3, | | |
| | | | | | | | L0769: 3, L0775: 3, L0776: | | |
| | | | | | | | 3, L0756: 3, L0752: 3, | | |
| | | | | | | | L0604: 3, H0265: 2, S0040: | | |
| | | | | | | | 2, H0599: 2, H0545: 2, | | |
| | | | | | | | H0266: 2, H0030: 2, H0617: | | |
| | | | | | | | 2, H0135: 2, L0771: 2, | | |
| | | | | | | | L0662: 2, L0806: 2, L0805: | | |
| | | | | | | | 2, L0659: 2, L0666: 2, | | |
| | | | | | | | L0665: 2, H0520: 2, H0547: | | |
| | | | | | | | 2, H0519: 2, H0659: 2, | | |
| | | | | | | | S0404: 2, L0743: 2, L0758: | | |
| | | | | | | | 2, L0596: 2, L0605: 2, | | |
| | | | | | | | L0485: 2, H0739: 1, H0171: | | |
| | | | | | | | 1, H0713: 1, S0134: 1, | | |
| | | | | | | | S0218: 1, H0657: 1, H0656: | | |
| | | | | | | | 1, S0212: 1, H0663: 1, | | |
| | | | | | | | S0420: 1, S0408: 1, H0742: | | |
| | | | | | | | 1, S0132: 1, S0476: 1, | | |
| | | | | | | | H0393: 1, H0587: 1, T0040: | | |
| | | | | | | | 1, T0060: 1, H0575: 1, | | |
| | | | | | | | H0309: 1, H0009: 1, L0471: | | |
| | | | | | | | 1, H0620: 1, H0510: 1, | | |
| | | | | | | | H0290: 1, S0250: 1, S0022: | | |
| | | | | | | | 1, T0023: 1, L0055: 1, | | |
| | | | | | | | H0634: 1, H0488: 1, H0268: | | |
| | | | | | | | 1, T0041: 1, T0042: 1, | | |
| | | | | | | | H0538: 1, S0210: 1, L0763: | | |
| | | | | | | | 1, L0639: 1, L0764: 1, | | |
| | | | | | | | L0794: 1, L0649: 1, L0804: | | |
| | | | | | | | 1, L0650: 1, L0774: 1, | | |
| | | | | | | | L0809: 1, L5622: 1, L5623: | | |
| | | | | | | | 1, L0793: 1, L0664: 1, | | |
| | | | | | | | H0144: 1, H0593: 1, S0122: | | |
| | | | | | | | 1, H0435: 1, H0521: 1, | | |
| | | | | | | | S0406: 1, H0555: 1, L0740: | | |
| | | | | | | | 1, L0747: 1, L0749: 1, | | |
| | | | | | | | L0779: 1, L0731: 1, L0759: | | |
| | | | | | | | 1, S0031: 1, S0434: 1, S0436: | | |
| | | | | | | | 1, L0601: 1, S0106: 1, | | |
| | | | | | | | H0665: 1, H0667: 1 and | | |
| | | | | | | | S0276: 1. | | |
| | HTAOK88 | 1293280 | 104 | 97-687 | 297 | Phe-166 to Arg-174, | L0777: 8, L0766: 7, L0741: | | |
| | | | | | | Ser-191 to Tyr-196. | 7, L0439: 7, L0748: 5, | | |
| | | | | | | | L0754: 5, L0744: 4, L0757: | | |
| | | | | | | | 4, S0192: 4, H0677: 4, | | |
| | | | | | | | H0556: 3, S0360: 3, S0410: | | |
| | | | | | | | 3, H0013: 3, H0052: 3, | | |
| | | | | | | | L0769: 3, L0775: 3, L0776: | | |
| | | | | | | | 3, L0756: 3, L0752: 3, | | |
| | | | | | | | L0604: 3, H0265: 2, S0040: | | |
| | | | | | | | 2, H0599: 2, H0545: 2, | | |
| | | | | | | | H0266: 2, H0030: 2, H0617: | | |
| | | | | | | | 2, H0135: 2, L0771: 2, | | |
| | | | | | | | L0662: 2, L0806: 2, L0805: | | |
| | | | | | | | 2, L0659: 2, L0666: 2, | | |
| | | | | | | | L0665: 2, H0520: 2, H0547: | | |
| | | | | | | | 2, H0519: 2, H0659: 2, | | |
| | | | | | | | S0404: 2, L0743: 2, L0758: | | |
| | | | | | | | 2, L0596: 2, L0605: 2, | | |
| | | | | | | | L0485: 2, H0739: 1, H0171: | | |
| | | | | | | | 1, H0713: 1, S0134: 1, | | |
| | | | | | | | S0218: 1, H0657: 1, H0656: | | |
| | | | | | | | 1, S0212: 1, H0663: 1, | | |
| | | | | | | | S0420: 1, S0408: 1, H0742: | | |
| | | | | | | | 1, S0132: 1, S0476: 1, | | |
| | | | | | | | H0393: 1, H0587: 1, T0040: | | |
| | | | | | | | 1, T0060: 1, H0575: 1, | | |
| | | | | | | | H0309: 1, H0009: 1, L0471: | | |
| | | | | | | | 1, H0620: 1, H0510: 1, | | |
| | | | | | | | H0290: 1, S0250: 1, S0022: | | |
| | | | | | | | 1, T0023: 1, L0055: 1, | | |
| | | | | | | | H0634: 1, H0488: 1, H0268: | | |
| | | | | | | | 1, T0041: 1, T0042: 1, | | |
| | | | | | | | H0538: 1, S0210: 1, L0763: | | |
| | | | | | | | 1, L0639: 1, L0764: 1, | | |
| | | | | | | | L0794: 1, L0649: 1, L0804: | | |
| | | | | | | | 1, L0650: 1, L0774: 1, | | |
| | | | | | | | L0809: 1, L5622: 1, L5623: | | |
| | | | | | | | 1, L0793: 1, L0664: 1, | | |
| | | | | | | | H0144: 1, H0593: 1, S0122: | | |
| | | | | | | | 1, H0435: 1, H0521: 1, | | |
| | | | | | | | S0406: 1, H0555: 1, L0740: | | |
| | | | | | | | 1, L0747: 1, L0749: 1, | | |
| | | | | | | | L0779: 1, L0731: 1, L0759: | | |
| | | | | | | | 1, S0031: 1, S0434: 1, S0436: | | |
| | | | | | | | 1, L0601: 1, S0106: 1, | | |
| | | | | | | | H0665: 1, H0667: 1 and | | |
| | | | | | | | S0276: 1. | | |
| | HTAOK88 | 1297164 | 105 | 478-1068 | 298 | Phe-166 to Arg-174, | | | |
| | | | | | | Ser-191 to Tyr-196. | | | |
| 5 | HDSIX96 | 1303148 | 15 | 91-345 | 208 | | H0728: 1 | | |
| | HDSIX96 | 1289651 | 106 | 91-345 | 299 | | H0728: 1 | | |
| | HDSIX96 | 1290008 | 107 | 103-357 | 300 | | | | |
| | HDSIX96 | 1290003 | 108 | 103-357 | 301 | | | | |
| | HDSIX96 | 1289164 | 109 | 39-179 | 302 | | | | |
| 6 | HATYJ68 | 1332728 | 16 | 104-1306 | 209 | | S0410: 13, L0777: 12, | | |
| | | | | | | | L0748: 9, T0060: 6, H0553: | | |
| | | | | | | | 4, H0672: 3, L0439: 3, | | |
| | | | | | | | L0749: 3, S0436: 3, S0134: 2, | | |
| | | | | | | | H0661: 2, S0376: 2, S0278: | | |
| | | | | | | | 2, H0575: 2, S0003: 2, | | |
| | | | | | | | S0022: 2, H0674: 2, S0440: | | |
| | | | | | | | 2, L0646: 2, L0662: 2, | | |
| | | | | | | | L0809: 2, L0740: 2, L0754: | | |
| | | | | | | | 2, L0755: 2, L0758: 2, | | |
| | | | | | | | S0434: 2, H0506: 2, H0716: | | |
| | | | | | | | 1, T0049: 1, H0657: 1, | | |
| | | | | | | | H0656: 1, S0358: 1, S0468: | | |
| | | | | | | | 1, H0437: 1, S6022: 1, | | |
| | | | | | | | H0574: 1, H0632: 1, H0250: | | |
| | | | | | | | 1, H0427: 1, S0280: 1, | | |
| | | | | | | | H0156: 1, L0021: 1, H0620: | | |
| | | | | | | | 1, H0594: 1, S0214: 1, | | |
| | | | | | | | H0622: 1, H0169: 1, H0135: | | |
| | | | | | | | 1, H0038: 1, H0634: 1, | | |
| | | | | | | | H0268: 1, H0623: 1, S0015: | | |
| | | | | | | | 1, S0438: 1, H0641: 1, | | |
| | | | | | | | H0646: 1, S0142: 1, S0344: | | |
| | | | | | | | 1, H0695: 1, L0598: 1, | | |
| | | | | | | | L0763: 1, L0769: 1, L0637: | | |
| | | | | | | | 1, L0667: 1, L0641: 1, | | |
| | | | | | | | L0764: 1, L0768: 1, L0806: | | |
| | | | | | | | 1, L0653: 1, L0655: 1, | | |
| | | | | | | | L0657: 1, L5623: 1, L0663: | | |
| | | | | | | | 1, L0665: 1, H0144: 1, | | |
| | | | | | | | H0702: 1, H0703: 1, H0519: | | |
| | | | | | | | 1, H0593: 1, S0330: 1, | | |
| | | | | | | | H0518: 1, H0521: 1, H0555: | | |
| | | | | | | | 1, L0779: 1, H0445: 1, | | |
| | | | | | | | H0543: 1 and H0423: 1. | | |
| | HATYJ68 | 1296680 | 110 | 91-1293 | 303 | Ala-2 to Glu-7, | S0410: 13, L0777: 12, | | |
| | | | | | | Glu-60 to Gly-72, | L0748: 9, T0060: 6, H0553: | | |
| | | | | | | Asn-139 to Gly-144, | 4, H0672: 3, L0439: 3, | | |
| | | | | | | Gln-237 to Lys-244, | L0749: 3, S0436: 3, S0134: 2, | | |
| | | | | | | Pro-330 to Pro-340, | H0661: 2, S0376: 2, S0278: | | |
| | | | | | | Pro-349 to Ser-361, | 2, H0575: 2, S0003: 2, | | |
| | | | | | | Ser-363 to Cys-371, | S0022: 2, H0674: 2, S0440: | | |
| | | | | | | Pro-373 to Glu-381, | 2, L0646: 2, L0662: 2, | | |
| | | | | | | Gly-389 to Gly-397. | L0809: 2, L0740: 2, L0754: | | |
| | | | | | | | 2, L0755: 2, L0758: 2, | | |
| | | | | | | | S0434: 2, H0506: 2, H0716: | | |
| | | | | | | | 1, T0049: 1, H0657: 1, | | |
| | | | | | | | H0656: 1, S0358: 1, S0468: | | |
| | | | | | | | 1, H0437: 1, S6022: 1, | | |
| | | | | | | | H0574: 1, H0632: 1, H0250: | | |
| | | | | | | | 1, H0427: 1, S0280: 1, | | |
| | | | | | | | H0156: 1, L0021: 1, H0620: | | |
| | | | | | | | 1, H0594: 1, S0214: 1, | | |
| | | | | | | | H0622: 1, H0169: 1, H0135: | | |
| | | | | | | | 1, H0038: 1, H0634: 1, | | |
| | | | | | | | H0268: 1, H0623: 1, S0015: | | |
| | | | | | | | 1, S0438: 1, H0641: 1, | | |
| | | | | | | | H0646: 1, S0142: 1, S0344: | | |
| | | | | | | | 1, H0695: 1, L0598: 1, | | |
| | | | | | | | L0763: 1, L0769: 1, L0637: | | |
| | | | | | | | 1, L0667: 1, L0641: 1, | | |
| | | | | | | | L0764: 1, L0768: 1, L0806: | | |
| | | | | | | | 1, L0653: 1, L0655: 1, | | |
| | | | | | | | L0657: 1, L5623: 1, L0663: | | |
| | | | | | | | 1, L0665: 1, H0144: 1, | | |
| | | | | | | | H0702: 1, H0703: 1, H0519: | | |
| | | | | | | | 1, H0593: 1, S0330: 1, | | |
| | | | | | | | H0518: 1, H0521: 1, H0555: | | |
| | | | | | | | 1, L0779: 1, H0445: 1, | | |
| | | | | | | | H0543: 1 and H0423: 1. | | |
| | HATYJ68 | 1296903 | 111 | 104-1306 | 304 | Ala-2 to Glu-7, | | | |
| | | | | | | Glu-60 to Gly-72, | | | |
| | | | | | | Asn-139 to Gly-144, | | | |
| | | | | | | Gln-237 to Lys-244, | | | |
| | | | | | | Pro-330 to Pro-340, | | | |
| | | | | | | Pro-349 to Ser-361, | | | |
| | | | | | | Ser-363 to Cys-371, | | | |
| | | | | | | Pro-373 to Glu-381, | | | |
| | | | | | | Gly-389 to Gly-397. | | | |
| 7 | HDSJH26 | 1326515 | 17 | 129-506 | 210 | | H0728: 1 | | |
| | HDSJH26 | 1291039 | 112 | 130-507 | 305 | Ser-39 to Asn-44. | H0728: 1 | | |
| | HDSJH26 | 1291041 | 113 | 119-496 | 306 | Ser-39 to Asn-44. | | | |
| | HDSJH26 | 1291040 | 114 | 85-282 | 307 | | | | |
| 8 | HNMIG09 | 1299005 | 18 | 176-1060 | 211 | Thr-35 to Gly-46, | H0599: 1, H0052: 1, | | |
| | | | | | | Asn-66 to Glu-73, | T0006: 1, S0366: 1, H0732: | | |
| | | | | | | Glu-203 to Gly-211, | 1, L0753: 1 and L0757: 1. | | |
| | | | | | | Cys-279 to | | | |
| | | | | | | Asp-294. | | | |
| | HNMIG09 | 1299037 | 115 | 149-1033 | 308 | Thr-35 to Gly-46, | | | |
| | | | | | | Asn-66 to Glu-73, | | | |
| | | | | | | Glu-203 to Gly-211, | | | |
| | | | | | | Cys-279 to | | | |
| | | | | | | Asp-294. | | | |
| 9 | HLCMJ69 | 1299006 | 19 | 88-939 | 212 | | L0794: 6, H0545: 4, L0777: | | |
| | | | | | | | 4, L0659: 3, S0126: 3, | | |
| | | | | | | | H0662: 2, L0717: 2, H0150: | | |
| | | | | | | | 2, H0041: 2, S0250: 2, | | |
| | | | | | | | H0252: 2, H0628: 2, L0803: | | |
| | | | | | | | 2, L0805: 2, L0747: 2, | | |
| | | | | | | | L0750: 2, H0381: 1, S0358: | | |
| | | | | | | | 1, H0586: 1, H0485: 1, | | |
| | | | | | | | H0486: 1, L0021: 1, H0251: | | |
| | | | | | | | 1, H0544: 1, H0284: 1, | | |
| | | | | | | | L0770: 1, L0769: 1, L0772: | | |
| | | | | | | | 1, L0641: 1, L0787: 1, | | |
| | | | | | | | L0751: 1, L0749: 1, L0779: | | |
| | | | | | | | 1, L0759: 1, S0011: 1 and | | |
| | | | | | | | S0192: 1. | | |
| | HLCMJ69 | 1299048 | 116 | 76-927 | 309 | | | | |
| 10 | HNMIB80 | 1299275 | 20 | 465-1655 | 213 | Ala-3 to Gly-8, | H0706: 8, H0708: 7, H0735: | | |
| | | | | | | Pro-41 to Val-46, | 6, S0366: 5, S0364: 4, L0485: | | |
| | | | | | | Pro-74 to Gln-84, | 4, L0604: 4, H0733: 3, | | |
| | | | | | | Lys-187 to His-193, | L0777: 3, H0734: 2, L0623: | | |
| | | | | | | Pro-243 to Glu-249, | 2, S0362: 2, H0373: 2, | | |
| | | | | | | Glu-258 to Ser-271, | H0743: 2, L0520: 2, H0725: | | |
| | | | | | | Glu-291 to Gly-296, | 2, L0747: 2, H0624: 1, | | |
| | | | | | | Asp-309 to | H0729: 1, H0728: 1, H0619: | | |
| | | | | | | Asp-315, | 1, H0550: 1, H0196: 1, | | |
| | | | | | | Asp-362 to Ser-369, | L0646: 1, L0809: 1, H0693: | | |
| | | | | | | Ile-385 to Asp-396. | 1, S0328: 1, H0214: 1 and | | |
| | | | | | | | H0732: 1. | | |
| 11 | HDLLA60 | 1294672 | 21 | 117-2135 | 214 | Glu-34 to Gly-48, | H0724: 5, H0722: 3, L0665: | | |
| | | | | | | Pro-51 to Gly-59, | 3, H0741: 2, S0132: 2, | | |
| | | | | | | Pro-91 to Val-96, | L0439: 2, L0596: 2, H0542: | | |
| | | | | | | Arg-119 to Arg-134, | 2, H0543: 2, S0114: 1, | | |
| | | | | | | His-236 to His-245, | S0116: 1, S0420: 1, H0614: | | |
| | | | | | | Thr-282 to Ser-290, | 1, H0587: 1, S0280: 1, | | |
| | | | | | | Gly-351 to Ser-358, | H0253: 1, H0581: 1, H0457: | | |
| | | | | | | Thr-485 to Gly-490, | 1, H0012: 1, H0083: 1, | | |
| | | | | | | Gln-550 to Ala-563, | H0687: 1, H0622: 1, H0135: | | |
| | | | | | | Arg-568 to Pro-575 | 1, L0796: 1, L5565: 1, | | |
| | | | | | | | L0646: 1, L0643: 1, L0764: | | |
| | | | | | | | 1, L0773: 1, L0649: 1, | | |
| | | | | | | | L0659: 1, L0809: 1, L0663: | | |
| | | | | | | | 1, L0438: 1, H0555: 1, | | |
| | | | | | | | H0478: 1, L0752: 1, L0599: 1 | | |
| | | | | | | | and H0506: 1. | | |
| | HDLLA60 | 1299173 | 117 | 268-2286 | 310 | Glu-34 to Gly-48, | | | |
| | | | | | | Pro-51 to Gly-59, | | | |
| | | | | | | Pro-91 to Val-96, | | | |
| | | | | | | Arg-119 to Arg-134, | | | |
| | | | | | | His-236 to His-245, | | | |
| | | | | | | Thr-282 to Ser-290, | | | |
| | | | | | | Gly-351 to Ser-358, | | | |
| | | | | | | Thr-485 to Gly-490, | | | |
| | | | | | | Gln-550 to Ala-563, | | | |
| | HDLLA60 | 1299172 | 118 | 1142-1174 | 311 | Glu-34 to Gly-48, | | | |
| | | | | | | Pro-51 to Gly-59, | | | |
| | | | | | | Pro-91 to Val-96, | | | |
| | | | | | | Arg-119 to Arg-134, | | | |
| | | | | | | His-236 to His-245, | | | |
| | | | | | | Thr-282 to Ser-290, | | | |
| | | | | | | Gly-351 to Ser-358, | | | |
| | | | | | | Thr-485 to Gly-490, | | | |
| | | | | | | Gln-550 to Ala-563, | | | |
| | | | | | | Arg-568 to Pro-575. | | | |
| 12 | HDSIX56 | 1320236 | 22 | 33-515 | 215 | Glu-54 to Lys-59, | H0637: 1 and H0728: 1. | | |
| | | | | | | Arg-74 to Lys-81. | | | |
| | HDSIX56 | 1291032 | 119 | 22-504 | 312 | Glu-54 to Lys-59, | | | |
| | | | | | | Arg-74 to Lys-81. | | | |
| | HDSIX56 | 1291035 | 120 | 33-515 | 313 | Glu-54 to Lys-59, | | | |
| | | | | | | Arg-74 to Lys-81. | | | |
| 13 | HFLEZ28 | 1326771 | 23 | 160-807 | 216 | | H0040: 4, H0730: 1, H0421: | | |
| | | | | | | | 1, L0645: 1 and H0727: 1. | | |
| | HFLEZ28 | 1290037 | 121 | 171-818 | 314 | Glu-4 to Lys-9, | H0040: 4, H0730: 1, H0421: | | |
| | | | | | | His-44 to Gly-54, | 1, L0645: 1 and H0727: 1. | | |
| | | | | | | Glu-69 to Lys-74, | | | |
| | | | | | | Ala-76 to Asn-82, | | | |
| | | | | | | Ala-90 to Cys-95, | | | |
| | | | | | | Leu-99 to Ser-113, | | | |
| | | | | | | Arg-146 to Trp-156, | | | |
| | | | | | | Thr-160 to Phe-168, | | | |
| | | | | | | Lys-171 to Glu-180, | | | |
| | | | | | | Asn-188 to | | | |
| | | | | | | Asn-195. | | | |
| | HFLEZ28 | 1290307 | 122 | 160-807 | 315 | Glu-4 to Lys-9, | | | |
| | | | | | | His-44 to Gly-54, | | | |
| | | | | | | Glu-69 to Lys-74, | | | |
| | | | | | | Ala-76 to Asn-82, | | | |
| | | | | | | Ala-90 to Cys-95, | | | |
| | | | | | | Leu-99 to Ser-113, | | | |
| | | | | | | Arg-146 to Trp-156, | | | |
| | | | | | | Thr-160 to Phe-168, | | | |
| | | | | | | Lys-171 to Glu-180, | | | |
| | | | | | | Asn-188 to | | | |
| | | | | | | Asn-195. | | | |
| | HFLEZ28 | 1290045 | 123 | 188-835 | 316 | Glu-4 to Lys-9, | | | |
| | | | | | | His-44 to Gly-54, | | | |
| | | | | | | Glu-69 to Lys-74, | | | |
| | | | | | | Ala-76 to Asn-82, | | | |
| | | | | | | Ala-90 to Cys-95, | | | |
| | | | | | | Leu-99 to Ser-113, | | | |
| | | | | | | Arg-146 to Trp-156, | | | |
| | | | | | | Thr-160 to Phe-168, | | | |
| | | | | | | Lys-171 to Glu-180, | | | |
| | | | | | | Asn-188 to Asn-195 | | | |
| 14 | HDMSA74 | 1336632 | 24 | 208-1815 | 217 | | S0250: 3, S0418: 1, H0734: | | |
| | | | | | | | 1, T0040: 1, H0413: 1 and | | |
| | | | | | | | H0756: 1. | | |
| | HDMSA74 | 1306175 | 124 | 208-621 | 317 | | S0250: 3, S0418: 1, H0734: | | |
| | | | | | | | 1, T0040: 1, H0413: 1 and | | |
| | | | | | | | H0756: 1. | | |
| | HDMSA74 | 1306392 | 125 | 2-169 | 318 | | | | |
| 15 | HDMSQ09 | 1335780 | 25 | 108-1052 | 218 | | H0734: 5, S0360: 2, H0052: | | |
| | | | | | | | 2, S0366: 2, L0502: 2, S0400: | | |
| | | | | | | | 1, H0729: 1, H0733: 1, | | |
| | | | | | | | L0623: 1, H0156: 1, H0122: | | |
| | | | | | | | 1, H0706: 1, H0424: 1, | | |
| | | | | | | | H0617: 1, S0036: 1, H0396: | | |
| | | | | | | | 1, H0547: 1, H0660: 1 and | | |
| | | | | | | | H0666: 1. | | |
| | HDMSQ09 | 1305924 | 126 | 92-784 | 319 | Ala-25 to Thr-30. | H0734: 5, S0360: 2, H0052: | | |
| | | | | | | | 2, S0366: 2, L0502: 2, S0400: | | |
| | | | | | | | 1, H0729: 1, H0733: 1, | | |
| | | | | | | | L0623: 1, H0156: 1, H0122: | | |
| | | | | | | | 1, H0706: 1, H0424: 1, | | |
| | | | | | | | H0617: 1, S0036: 1, H0396: | | |
| | | | | | | | 1, H0547: 1, H0660: 1 and | | |
| | | | | | | | H0666: 1. | | |
| | HDMSQ09 | 1306396 | 127 | 113-547 | 320 | Gly-1 to Pro-14, | | | |
| | | | | | | Pro-70 to Pro-75, | | | |
| | | | | | | Gln-122 to Arg-129. | | | |
| 16 | HDMTG72 | 1322802 | 26 | 46-339 | 219 | | L0622: 25, H0708: 19, | | |
| | | | | | | | L0163: 14, H0733: 12, | | |
| | | | | | | | L0604: 10, H0735: 8, H0729: | | |
| | | | | | | | 7, L0623: 6, H0732: 5, | | |
| | | | | | | | H0728: 4, H0743: 4, L0777: | | |
| | | | | | | | 4, S0366: 3, H0734: 2, | | |
| | | | | | | | H0725: 2, H0101: 1, H0097: | | |
| | | | | | | | 1, H0599: 1, H0706: 1, | | |
| | | | | | | | H0196: 1, H0251: 1, H0200: | | |
| | | | | | | | 1, H0373: 1, H0424: 1, | | |
| | | | | | | | S0364: 1, L0783: 1, L0809: | | |
| | | | | | | | 1, S0392: 1, L0747: 1 and | | |
| | | | | | | | L0779: 1. | | |
| | HDMTG72 | 1305913 | 128 | 93-386 | 321 | Ser-47 to Gln-63, | L0622: 25, H0708: 19, | 16p | |
| | | | | | | Leu-65 to Asn-78, | L0163: 14, H0733: 12, | | |
| | | | | | | Pro-91 to Pro-97. | L0604: 10, H0735: 8, H0729: | | |
| | | | | | | | 7, L0623: 6, H0732: 5, | | |
| | | | | | | | H0728: 4, H0743: 4, L0777: | | |
| | | | | | | | 4, S0366: 3, H0734: 2, | | |
| | | | | | | | H0725: 2, H0101: 1, H0097: | | |
| | | | | | | | 1, H0599: 1, H0706: 1, | | |
| | | | | | | | H0196: 1, H0251: 1, H0200: | | |
| | | | | | | | 1, H0373: 1, H0424: 1, | | |
| | | | | | | | S0364: 1, L0783: 1, L0809: | | |
| | | | | | | | 1, S0392: 1, L0747: 1 and | | |
| | | | | | | | L0779: 1. | | |
| 17 | HTAOQ18 | 1306268 | 27 | 88-744 | 220 | Pro-59 to Gly-65, | H0739: 187, H0743: 14, | | |
| | | | | | | Arg-83 to Asp-89, | S0410: 4, L0803: 4, L0809: | | |
| | | | | | | Ala-142 to Tyr-151, | 4, L0794: 3, L0775: 3, | | |
| | | | | | | Leu-191 to | H0341: 1, S0444: 1, H0617: | | |
| | | | | | | Asp-198. | 1, H0606: 1, L0773: 1, | | |
| | | | | | | | L0766: 1, L0499: 1, L0804: | | |
| | | | | | | | 1, L0657: 1, L0783: 1, | | |
| | | | | | | | H0696: 1, H0627: 1, S0028: 1 | | |
| | | | | | | | and L0596: 1. | | |
| | HTAOQ18 | 1306691 | 129 | 100-756 | 322 | Pro-59 to Gly-65, | | | |
| | | | | | | Arg-83 to Asp-89, | | | |
| | | | | | | Ala-142 toTyr-151, | | | |
| | | | | | | Leu-191 to | | | |
| | | | | | | Asp-198. | | | |
| 18 | HLAPM62 | 1322803 | 28 | 213-464 | 221 | | H0740: 2 | | |
| | HLAPM62 | 1306348 | 130 | 197-448 | 323 | | | | |
| 19 | HDLWY45 | 1336616 | 29 | 108-2126 | 222 | | H0724: 5, H0722: 4, L0665: | | |
| | | | | | | | 3, H0741: 2, S0132: 2, | | |
| | | | | | | | L0438: 2, L0439: 2, L0596: | | |
| | | | | | | | 2, H0542: 2, H0543: 2, | | |
| | | | | | | | S0114: 1, S0116: 1, H0614: | | |
| | | | | | | | 1, H0587: 1, S0280: 1, | | |
| | | | | | | | H0253: 1, H0581: 1, | | |
| | | | | | | | H0457: 1 | | |
| | | | | | | | 1, H0012, H0083: 1, | | |
| | | | | | | | H0687: 1, H0622: 1, H0135: | | |
| | | | | | | | 1, L0796: 1, L5565: 1, | | |
| | | | | | | | L0646: 1, L0643: 1, L0764: | | |
| | | | | | | | 1, L0773: 1, L0649: 1, | | |
| | | | | | | | L0659: 1, L0809: 1, L5622: | | |
| | | | | | | | 1, L0663: 1, H0555: 1, | | |
| | | | | | | | H0478: 1, L0752: 1, L0599: 1 | | |
| | | | | | | | and H0506: 1. | | |
| | HDLWY45 | 1307490 | 131 | 268-2286 | 324 | Glu-34 to Gly-48, | H0724: 5, H0722: 4, L0665: | | |
| | | | | | | Pro-51 to Gly-59, | 3, H0741: 2, S0132: 2, | | |
| | | | | | | Pro-91 to Val-96, | L0438: 2, L0439: 2, L0596: | | |
| | | | | | | Arg-119 to Arg-134, | 2, H0542: 2, H0543: 2, | | |
| | | | | | | His-236 to His-245, | S0114: 1, S0116: 1, H0614: | | |
| | | | | | | Thr-282 to Ser-290, | 1, H0587: 1, S0280: 1, | | |
| | | | | | | Gly-351 to Ser-358, | H0253: 1, H0581: 1, H0457: | | |
| | | | | | | Thr-485 to Gly-490, | 1, H0012: 1, H0083: 1, | | |
| | | | | | | Gln-550 to Ala-563, | H0687: 1, H0622: 1, H0135: | | |
| | | | | | | Arg-568 to Pro-575. | 1, L0796: 1, L5565: 1, | | |
| | | | | | | | L0646: 1, L0643: 1, L0764: | | |
| | | | | | | | 1, L0773: 1, L0649: 1, | | |
| | | | | | | | L0659: 1, L0809: 1, L5622: | | |
| | | | | | | | 1, L0663: 1, H0555: 1, | | |
| | | | | | | | H0478: 1, L0752: 1, L0599: 1 | | |
| | | | | | | | and H0506: 1. | | |
| | HDLWY45 | 1307489 | 132 | 25-129 | 325 | | | | |
| 20 | HDMKF05 | 1322800 | 30 | 27-356 | 223 | | L0623: 2, L0805: 2, L0759: | | |
| | | | | | | | 2, H0733: 1, L0622: 1, | | |
| | | | | | | | H0018: 1, S0364: 1, L0809: 1 | | |
| | | | | | | | and L0779: 1. | | |
| | HDMKF05 | 1306388 | 133 | 93-422 | 326 | Arg-47 to Ser-57, | L0623: 2, L0759: 2, H0733: | | |
| | | | | | | Asn-64 to Asn-69, | 1, L0622: 1, H0018: 1, | | |
| | | | | | | Pro-71 to Val-78. | S0364: 1, L0805: 1, L0809: 1 | | |
| | | | | | | | and L0779: 1. | | |
| 21 | HDMRQ63 | 1305906 | 31 | 129-401 | 224 | Pro-3 to Met-10, | H0734: 1 | | |
| | | | | | | Arg-43 to Arg-59, | | | |
| | | | | | | Pro-64 to Ser-77. | | | |
| | HDMRQ63 | 1306389 | 134 | 137-385 | 327 | | | | |
| 22 | HDMKE89 | 1335778 | 32 | 121-1116 | 225 | | L0754: 10, L0747: 6, | | |
| | | | | | | | L0766: 5, L0755: 5, L0761: | | |
| | | | | | | | L0803: 4, L0731: 4, | | |
| | | | | | | | H0556: 3, L0769: 3, L0783: | | |
| | | | | | | | 3, S0152: 3, L0744: 3, | | |
| | | | | | | | H0609: 2, H0586: 2, H0617: | | |
| | | | | | | | 2, T0042: 2, L0369: 2, | | |
| | | | | | | | L0800: 2, L0775: 2, L0806: | | |
| | | | | | | | 2, L0807: 2, L0789: 2, | | |
| | | | | | | | L0743: 2, L0596: 2, L0603: | | |
| | | | | | | | 2, H0265: 1, H0484: 1, | | |
| | | | | | | | H0254: 1, H0733: 1, H0619: | | |
| | | | | | | | 1, H0592: 1, H0318: 1, | | |
| | | | | | | | H0050: 1, H0012: 1, H0551: | | |
| | | | | | | | 1, S0038: 1, S0372: 1, S0150: | | |
| | | | | | | | 1, L0763: 1, L0770: 1, | | |
| | | | | | | | L4747: 1, L0637: 1, L0772: | | |
| | | | | | | | 1, L0662: 1, L0794: 1, | | |
| | | | | | | | L0804: 1, L0774: 1, L0776: | | |
| | | | | | | | 1, L0659: 1, L0809: 1, | | |
| | | | | | | | L0790: 1, H0672: 1, L0750: | | |
| | | | | | | | 1, L0779: 1, L0780: 1, | | |
| | | | | | | | L0752: 1, L0753: 1, L0758: | | |
| | | | | | | | 1, L0759: 1, S0436: 1 and | | |
| | | | | | | | S0424: 1. | | |
| | HDMKE89 | 1306400 | 135 | 134-1129 | 328 | Phe-184 to Lys-197, | L0754: 10, L0747: 6, | | |
| | | | | | | Glu-213 to Gly-220, | L0766: 5, L0755: 5, L0761: | | |
| | | | | | | Asp-289 to Pro-296, | 4, L0803: 4, L0731: 4, | | |
| | | | | | | Pro-298 to Glu-304, | H0556: 3, L0769: 3, L0783: | | |
| | | | | | | Ser-323 to Arg-331. | 3, S0152: 3, L0744: 3, | | |
| | | | | | | | H0609: 2, H0586: 2, H0617: | | |
| | | | | | | | 2, T0042: 2, L0369: 2, | | |
| | | | | | | | L0800: 2, L0775: 2, L0806: | | |
| | | | | | | | 2, L0807: 2, L0789: 2, | | |
| | | | | | | | L0743: 2, L0596: 2, L0603: | | |
| | | | | | | | 2, H0265: 1, H0484: 1, | | |
| | | | | | | | H0254: 1, H0733: 1, H0619: | | |
| | | | | | | | 1, H0592: 1, H0318: 1, | | |
| | | | | | | | H0050: 1, H0012: 1, H0551: | | |
| | | | | | | | 1, S0038: 1, S0372: 1, S0150: | | |
| | | | | | | | 1, L0763: 1, L0770: 1, | | |
| | | | | | | | L4747: 1, L0637: 1, L0772: | | |
| | | | | | | | 1, L0662: 1, L0794: 1, | | |
| | | | | | | | L0804: 1, L0774: 1, L0776: | | |
| | | | | | | | 1, L0659: 1, L0809: 1, | | |
| | | | | | | | L0790: 1, H0672: 1, L0750: | | |
| | | | | | | | 1, L0779: 1, L0780: 1, | | |
| | | | | | | | L0752: 1, L0753: 1, L0758: | | |
| | | | | | | | 1, L0759: 1, S0436: 1 and | | |
| | | | | | | | S0424: 1. | | |
| 23 | HNMIK76 | 1335784 | 33 | 95-412 | 226 | | H0732: 3, L0518: 2, H0735: | | |
| | | | | | | | 1 and H0196: 1. | | |
| | HNMIK76 | 1306246 | 136 | 78-395 | 329 | Asp-23 to Cys-30, | H0732: 3, L0518: 2, H0735: | | |
| | | | | | | Pro-48 to Arg-53, | 1 and H0196: 1. | | |
| | | | | | | Gln-64 to Lys-71, | | | |
| | | | | | | phe-87 to Arg-94. | | | |
| 24 | HDHMA62 | 1322683 | 34 | 197-466 | 227 | | L3905: 2, S0030: 1, H0572: | | |
| | | | | | | | 1, T0010: 1, L0435: 1 and | | |
| | | | | | | | L0439: 1. | | |
| | HDHMA62 | 1305882 | 137 | 736-1005 | 330 | Gln-43 to Phe-49. | L3905: 2, S0030: 1, H0572: | | |
| | | | | | | | 1, T0010: 1, L0435: 1 and | | |
| | | | | | | | L0439: 1. | | |
| | HDHMA62 | 1306218 | 138 | 2-148 | 331 | | | | |
| 25 | HDQDT24 | 1333991 | 35 | 62-679 | 228 | | H0521: 7, L0665: 4, H0638: | | |
| | | | | | | | 3, H0658: 3, H0255: 2, | | |
| | | | | | | | H0250: 2, H0618: 2, L0804: | | |
| | | | | | | | 2, L0779: 2, H0542: 2, | | |
| | | | | | | | H0663: 1, S0046: 1, H0617: | | |
| | | | | | | | 1, H0560: 1, H0641: 1, | | |
| | | | | | | | S0422: 1, S0426: 1, H0695: | | |
| | | | | | | | 1, L0655: 1, H0689: 1, | | |
| | | | | | | | H0435: 1, H0522: 1, H0555: | | |
| | | | | | | | 1, H0543: 1, H0423: 1 and | | |
| | | | | | | | H0506: 1. | | |
| | HDQDT24 | 1306219 | 139 | 62-679 | 332 | Gln-22 to Gln-44, | H0521: 7, L0665: 4, H0638: | | |
| | | | | | | Ala-90 to Gly-95, | 3, H0658: 3, H0255: 2, | | |
| | | | | | | Gln-118 to Gln-125, | H0250: 2, H0618: 2, L0804: | | |
| | | | | | | Gly-147 to Glu-152, | 2, L0779: 2, H0542: 2, | | |
| | | | | | | Leu-182 to Gly-197, | H0663: 1, S0046: 1, H0617: | | |
| | | | | | | Gln-199 to Val-205. | 1, H0560: 1, H0641: 1, | | |
| | | | | | | | S0422: 1, S0426: 1, H0695: | | |
| | | | | | | | 1, L0655: 1, H0689: 1, | | |
| | | | | | | | H0435: 1, H0522: 1, H0555: | | |
| | | | | | | | 1, H0543: 1, H0423: 1 and | | |
| | | | | | | | H0506: 1. | | |
| | HDQDT24 | 1306221 | 140 | 2-1669 | 333 | Asp-1 to Arg-10, | | | |
| | | | | | | Gln-48 to Gln-70, | | | |
| | | | | | | Ala-79 to Gly-84. | | | |
| | HDQDT24 | 1306220 | 141 | 109-627 | 334 | Gln-22 to Gln-44, | | | |
| | | | | | | Ala-90 to Gly-95, | | | |
| | | | | | | Lys-137 to Trp-146. | | | |
| 26 | HEOOV77 | 1318709 | 36 | 68-2161 | 229 | | H0747: 5, H0749: 5, H0521: | | |
| | | | | | | | 5, H0457: 2, T0071: 1, | | |
| | | | | | | | H0264: 1, L0794: 1, L0804: | | |
| | | | | | | | 1, L0659: 1, H0522: 1 and | | |
| | | | | | | | S0404: 1. | | |
| | HEOOV77 | 812736 | 142 | 52-435 | 335 | Pro-46 to Gly-52, | AR241: 20, AR194: 13, | | |
| | | | | | | Asn-76 to Arg-89. | AR313: 13, AR206: 12, | | |
| | | | | | | | AR244: 12, AR192: 12, | | |
| | | | | | | | AR202: 11, AR248: 10, | | |
| | | | | | | | AR265: 10, AR198: 10, | | |
| | | | | | | | AR096: 10, AR310: 9, | | |
| | | | | | | | AR263: 9, AR207: 9, | | |
| | | | | | | | AR243: 8, AR183: 8, | | |
| | | | | | | | AR269: 8, AR039: 8, | | |
| | | | | | | | AR182: 8, AR299: 8, | | |
| | | | | | | | AR052: 8, AR270: 7, | | |
| | | | | | | | AR247: 7, AR292: 7, | | |
| | | | | | | | AR089: 7, AR186: 7, | | |
| | | | | | | | AR161: 7, AR033: 7, | | |
| | | | | | | | AR213: 7, AR284: 7, | | |
| | | | | | | | AR184: 7, AR162: 7, | | |
| | | | | | | | AR173: 7, AR264: 7, | | |
| | | | | | | | AR252: 7, AR163: 7, | | |
| | | | | | | | AR300: 7, AR293: 7, | | |
| | | | | | | | AR282: 7, AR229: 7, | | |
| | | | | | | | AR312: 7, AR316: 7, | | |
| | | | | | | | AR104: 6, AR273: 6, | | |
| | | | | | | | AR277: 6, AR240: 6, | | |
| | | | | | | | AR271: 6, AR285: 6, | | |
| | | | | | | | AR246: 6, AR296: 6, | | |
| | | | | | | | AR219: 6, AR298: 6, | | |
| | | | | | | | AR235: 6, AR180: 6, | | |
| | | | | | | | AR185: 6, AR218: 6, | | |
| | | | | | | | AR250: 6, AR253: 6, | | |
| | | | | | | | AR053: 6, AR195: 6, | | |
| | | | | | | | AR175: 6, AR165: 6, | | |
| | | | | | | | AR268: 6, AR238: 6, | | |
| | | | | | | | AR245: 6, AR226: 6, | | |
| | | | | | | | AR258: 5, AR251: 5, | | |
| | | | | | | | AR290: 5, AR164: 5, | | |
| | | | | | | | AR166: 5, AR212: 5, | | |
| | | | | | | | AR259: 5, AR205: 5, | | |
| | | | | | | | AR196: 5, AR289: 5, | | |
| | | | | | | | AR266: 5, AR283: 5, | | |
| | | | | | | | AR176: 5, AR177: 5, | | |
| | | | | | | | AR291: 5, AR223: 5, | | |
| | | | | | | | AR257: 5, AR197: 5, | | |
| | | | | | | | AR294: 5, AR295: 5, | | |
| | | | | | | | AR234: 5, AR288: 5, | | |
| | | | | | | | AR222: 5, AR193: 5, | | |
| | | | | | | | AR174: 4, AR286: 4, | | |
| | | | | | | | AR267: 4, AR204: 4, | | |
| | | | | | | | AR242: 4, AR178: 4, | | |
| | | | | | | | AR297: 4, AR221: 4, | | |
| | | | | | | | AR224: 4, AR275: 4, | | |
| | | | | | | | AR309: 4, AR262: 4, | | |
| | | | | | | | AR274: 4, AR236: 4, | | |
| | | | | | | | AR287: 4, AR311: 4, | | |
| | | | | | | | AR249: 4, AR170: 4, | | |
| | | | | | | | AR179: 4, AR060: 4, | | |
| | | | | | | | AR199: 4, AR261: 4, | | |
| | | | | | | | AR231: 4, AR210: 4, | | |
| | | | | | | | AR181: 3, AR168: 3, | | |
| | | | | | | | AR308: 3, AR216: 3, | | |
| | | | | | | | AR237: 3, AR189: 3, | | |
| | | | | | | | AR233: 3, AR232: 3, | | |
| | | | | | | | AR191: 3, AR260: 3, | | |
| | | | | | | | AR227: 3, AR272: 3, | | |
| | | | | | | | AR203: 3, AR171: 3, | | |
| | | | | | | | AR255: 3, AR200: 3, | | |
| | | | | | | | AR201: 3, AR211: 3, | | |
| | | | | | | | AR230: 3, AR214: 3, | | |
| | | | | | | | AR055: 3, AR217: 3, | | |
| | | | | | | | AR172: 2, AR256: 2, | | |
| | | | | | | | AR061: 2, AR225: 2, | | |
| | | | | | | | AR228: 2, AR239: 2, | | |
| | | | | | | | AR169: 1, AR188: 1 | | |
| | | | | | | | H0747: 5, H0749: 5, H0521: | | |
| | | | | | | | 5, H0457: 2, T0071: 1, | | |
| | | | | | | | H0264: 1, L0794: 1, L0804: | | |
| | | | | | | | 1, L0659: 1, H0522: 1 and | | |
| | | | | | | | S0404: 1. | | |
| | HEOOV77 | 1306137 | 143 | 115-1155 | 336 | Pro-46 to Gly-52, | | | |
| | | | | | | Asn-76 to Val-82, | | | |
| | | | | | | Ser-85 to Phe-90, | | | |
| | | | | | | Gly-94 to Asn-100, | | | |
| | | | | | | Gln-111 to Tyr-116, | | | |
| | | | | | | Cys-173 to Ser-179, | | | |
| | | | | | | Gln-188 to Ser-195, | | | |
| | | | | | | Pro-204 to Leu-213, | | | |
| | | | | | | Ser-246 to Pro-251. | | | |
| | HEOOV77 | 993277 | 144 | 3-2132 | 337 | Pro-59 to Gly-65, | | | |
| | | | | | | Asn-89 to Val-95, | | | |
| | | | | | | Ser-98 to Phe-103, | | | |
| | | | | | | Gly-107 to Asn-113, | | | |
| | | | | | | Gln-124 to Tyr-129, | | | |
| | | | | | | Cys-186 to Ser-192, | | | |
| | | | | | | Gln-201 to Ser-208, | | | |
| | | | | | | Pro-217 to Leu-226, | | | |
| | | | | | | Ser-259 to Asn-273, | | | |
| | | | | | | Ser-311 to Arg-317, | | | |
| | | | | | | Gly-329 to Tyr-334, | | | |
| | | | | | | Ala-338 to Arg-347, | | | |
| | | | | | | Ser-397 to Arg-402, | | | |
| | | | | | | Ser-404 to Gln-410, | | | |
| | | | | | | Pro-414 to Asp-419, | | | |
| | | | | | | Glu-497 to Asp-503, | | | |
| | | | | | | Pro-588 to His-604, | | | |
| | | | | | | Ala-621 to Pro-636, | | | |
| | | | | | | Gly-640 to Gln-653, | | | |
| | | | | | | Pro-660 to Glu-677, | | | |
| | | | | | | Gly-687 to Ala-694, | | | |
| | | | | | | Met-696 to Ala-702. | | | |
| 27 | HERHG93 | 1332320 | 37 | 193-633 | 230 | | L0731: 4, L0759: 4, L0809: | | |
| | | | | | | | 3, L0777: 3, S0212: 2, | | |
| | | | | | | | L3649: 2, H0748: 2, L0803: | | |
| | | | | | | | 2, L0789: 2, H0519: 2, | | |
| | | | | | | | H0624: 1, S0040: 1, S0180: | | |
| | | | | | | | 1, H0580: 1, L3387: 1, | | |
| | | | | | | | H0586: 1, H0497: 1, T0040: | | |
| | | | | | | | 1, L3653: 1, H0599: 1, | | |
| | | | | | | | T0082: 1, S0312: 1, S0314: 1, | | |
| | | | | | | | H0598: 1, H0551: 1, S0386: | | |
| | | | | | | | 1, H0494: 1, S0150: 1, | | |
| | | | | | | | L0761: 1, L0764: 1, L0794: | | |
| | | | | | | | 1, L0804: 1, L0783: 1, | | |
| | | | | | | | L3824: 1, H0547: 1, S0380: | | |
| | | | | | | | 1, S0152: 1, L0754: 1, | | |
| | | | | | | | L0749: 1 and L0755: 1. | | |
| | HERHG93 | 1306990 | 145 | 193-633 | 338 | Ala-24 to Pro-29, | L0731: 4, L0759: 4, L0809: | | |
| | | | | | | Asp-42 to Glu-50, | 3, L0777: 3, S0212: 2, | | |
| | | | | | | Asp-81 to Asn-86, | L3649: 2, H0748: 2, L0803: | | |
| | | | | | | Lys-102 to Gln-108, | 2, L0789: 2, H0519: 2, | | |
| | | | | | | Arg 126 to Tyr-135. | H0624: 1, S0040: 1, S0180: | | |
| | | | | | | | 1, H0580: 1, L3387: 1, | | |
| | | | | | | | H0586: 1, H0497: 1, T0040: | | |
| | | | | | | | 1, L3653: 1, H0599: 1, | | |
| | | | | | | | T0082: 1, S0312: 1, S0314: 1, | | |
| | | | | | | | H0598: 1, H0551: 1, S0386: | | |
| | | | | | | | 1, H0494: 1, S0150: 1, | | |
| | | | | | | | L0761: 1, L0764: 1, L0794: | | |
| | | | | | | | 1, L0804: 1, L0783: 1, | | |
| | | | | | | | L3824: 1, H0547: 1, S0380: | | |
| | | | | | | | 1, S0152: 1, L0754: 1, | | |
| | | | | | | | L0749: 1 and L0755: 1. | | |
| 28 | HESXG41 | 1306380 | 38 | 97-429 | 231 | Arg-37 to Glu-42, | H0749: 1 | | |
| | | | | | | Gln-94 to Pro-103. | | | |
| | HESXG41 | 1306690 | 146 | 108-440 | 339 | Arg-37 to Glu-42, | | | |
| | | | | | | Gln-94 to Pro-103. | | | |
| 29 | HFKFO58 | 1306612 | 39 | 49-555 | 232 | Met-1 to Arg-7, | H0617: 14, L0665: 14, | | 108725, 120700, |
| | | | | | | Glu-61 to Gly-68, | L0657: 11, H0682: 11, | | 133171, 143890, |
| | | | | | | Ala-92 to Glu-102, | H0521: 10, S0360: 8, H0423: | | 147670, 147670, |
| | | | | | | Glu-123 to Asn-129, | 7, H0740: 5, H0657: 5, | | 147670, 151440, |
| | | | | | | Asp-138 to Ser-149 | H0620: 5, H0687: 5, L0664: | | 164953, 231670, |
| | | | | | | | 5, H0547: 5, S0406: 5, | | 600276, 600957, |
| | | | | | | | S0376: 4, H0059: 4, H0641: | | 601843 |
| | | | | | | | 4, S0422: 4, L0648: 4, | | |
| | | | | | | | L0768: 4, H0658: 4, H0670: | | |
| | | | | | | | 4, H0666: 4, H0522: 4, | | |
| | | | | | | | H0584: 3, H0713: 3, H0716: | | |
| | | | | | | | 3, H0341: 3, H0638: 3, | | |
| | | | | | | | H0618: 3, H0039: 3, H0087: | | |
| | | | | | | | 3, H0509: 3, L0662: 3, | | |
| | | | | | | | L0775: 3, L0659: 3, H0689: | | |
| | | | | | | | 3, H0435: 3, S0328: 3, | | |
| | | | | | | | H0445: 3, S0434: 3, L0581: | | |
| | | | | | | | 3, L0361: 3, H0585: 2, | | |
| | | | | | | | H0717: 2, T0049: 2, H0730: | | |
| | | | | | | | 2, S0476: 2, S0278: 2, | | |
| | | | | | | | H0550: 2, H0586: 2, H0559: | | |
| | | | | | | | 2, H0486: 2, H0575: 2, | | |
| | | | | | | | H0253: 2, H0581: 2, H0622: | | |
| | | | | | | | 2, H0606: 2, H0625: 2, | | |
| | | | | | | | H0649: 2, L0667: 2, L0523: | | |
| | | | | | | | 2, L0382: 2, L3811: 2, | | |
| | | | | | | | L3826: 2, H0684: 2, L0743: | | |
| | | | | | | | 2, L0751: 2, L0599: 2, | | |
| | | | | | | | S0026: 2, H0543: 2, S0424: | | |
| | | | | | | | 2, H0171: 1, H0556: 1, | | |
| | | | | | | | L3643: 1, S0040: 1, H0650: | | |
| | | | | | | | 1, H0254: 1, H0255: 1, | | |
| | | | | | | | H0661: 1, H0663: 1, H0664: | | |
| | | | | | | | 1, H0761: 1, H0125: 1, | | |
| | | | | | | | S0356: 1, S0442: 1, S0354: 1, | | |
| | | | | | | | S0358: 1, S0408: 1, H0722: | | |
| | | | | | | | 1, H0747: 1, S0132: 1, | | |
| | | | | | | | S6026: 1, H0587: 1, L0623: | | |
| | | | | | | | 1, H0250: 1, L0021: 1, | | |
| | | | | | | | H0599: 1, T0082: 1, H0318: | | |
| | | | | | | | 1, S0474: 1, H0327: 1, | | |
| | | | | | | | H0530: 1, H0150: 1, L0471: | | |
| | | | | | | | 1, H0012: 1, H0023: 1, | | |
| | | | | | | | H0024: 1, H0014: 1, S0388: | | |
| | | | | | | | 1, H0071: 1, H0107: 1, | | |
| | | | | | | | H0275: 1, H0354: 1, H0510: | | |
| | | | | | | | 1, H0247: 1, H0271: 1, | | |
| | | | | | | | H0286: 1, H0615: 1, H0688: | | |
| | | | | | | | 1, H0553: 1, H0181: 1, | | |
| | | | | | | | H0124: 1, H0316: 1, H0477: | | |
| | | | | | | | 1, H0100: 1, H0561: 1, | | |
| | | | | | | | S0450: 1, S0438: 1, H0529: | | |
| | | | | | | | 1, L0371: 1, L0769: 1, | | |
| | | | | | | | L5575: 1, L0761: 1, L0772: | | |
| | | | | | | | 1, L0646: 1, L0645: 1, | | |
| | | | | | | | L0766: 1, L0774: 1, L0375: | | |
| | | | | | | | 1, L0651: 1, L0806: 1, | | |
| | | | | | | | L0658: 1, L0559: 1, L0783: | | |
| | | | | | | | 1, L0384: 1, L0793: 1, | | |
| | | | | | | | H0698: 1, H0765: 1, H0726: | | |
| | | | | | | | 1, H0519: 1, H0683: 1, | | |
| | | | | | | | H0660: 1, S0330: 1, H0754: | | |
| | | | | | | | 1, S0454: 1, H0696: 1, | | |
| | | | | | | | S0146: 1, H0576: 1, H0727: | | |
| | | | | | | | 1, H0732: 1, S0027: 1, | | |
| | | | | | | | S0031: 1, L0596: 1, H0542: | | |
| | | | | | | | 1, H0422: 1, S0456: 1 and | | |
| | | | | | | | H0352: 1. | | |
| | HFKFO58 | 1313088 | 147 | 179-685 | 340 | Met-1 to Arg-7, | | | |
| | | | | | | Glu-61 to Gly-68, | | | |
| | | | | | | Ala-92 to Glu-102, | | | |
| | | | | | | Glu-123 to Asn-129, | | | |
| | | | | | | Asp-138 to Ser-149. | | | |
| 30 | HFPKB52 | 1323767 | 40 | 31-591 | 233 | | S0196: 4, L0766: 3, S0380: | | |
| | | | | | | | 3, L0757: 3, S0358: 2, S0222: | | |
| | | | | | | | 2, S0474: 2, S0422: 2, | | |
| | | | | | | | H0658: 2, H0436: 2, L0362: | | |
| | | | | | | | 2, S0242: 2, H0556: 1, | | |
| | | | | | | | H0717: 1, S6024: 1, H0484: | | |
| | | | | | | | 1, S0420: 1, L0005: 1, | | |
| | | | | | | | H0393: 1, L0717: 1, H0549: | | |
| | | | | | | | 1, L0623: 1, H0635: 1, | | |
| | | | | | | | H0052: 1, H0596: 1, S0025: | | |
| | | | | | | | 1, H0328: 1, H0622: 1, | | |
| | | | | | | | T0006: 1, H0272: 1, S0344: | | |
| | | | | | | | 1, S0426: 1, L0771: 1, | | |
| | | | | | | | L0774: 1, L0382: 1, L0809: | | |
| | | | | | | | 1, H0689: 1, H0684: 1, | | |
| | | | | | | | H0659: 1, H0648: 1, H0672: | | |
| | | | | | | | 1, H0518: 1, H0521: 1, | | |
| | | | | | | | S0027: 1, L0744: 1, L0754: | | |
| | | | | | | | 1, L0745: 1, L0747: 1, | | |
| | | | | | | | L0780: 1, L0753: 1, L0758: | | |
| | | | | | | | 1, L0759: 1, S0436: 1, | | |
| | | | | | | | L0592: 1, L0608: 1, S0026: | | |
| | | | | | | | 1, H0543: 1, H0423: 1 and | | |
| | | | | | | | H0422: 1. | | |
| | HFPKB52 | 1307137 | 148 | 45-728 | 341 | Tyr-56 to Lys-65, | S0196: 4, L0766: 3, S0380: | | |
| | | | | | | Gln-93 to Phe-100, | 3, L0757: 3, S0358: 2, S0222: | | |
| | | | | | | Ser-104 to His-110, | 2, S0474: 2, S0422: 2, | | |
| | | | | | | Glu-168 to Arg-194. | H0658: 2, H0436: 2, L0362: | | |
| | | | | | | | 2, S0242: 2, H0556: 1, | | |
| | | | | | | | H0717: 1, S6024: 1, H0484: | | |
| | | | | | | | 1, S0420: 1, L0005: 1, | | |
| | | | | | | | H0393: 1, L0717: 1, H0549: | | |
| | | | | | | | 1, L0623: 1, H0635: 1, | | |
| | | | | | | | H0052: 1, H0596: 1, S0025: | | |
| | | | | | | | 1, H0328: 1, H0622: 1, | | |
| | | | | | | | T0006: 1, H0272: 1, S0344: | | |
| | | | | | | | 1, S0426: 1, L0771: 1, | | |
| | | | | | | | L0774: 1, L0382: 1, L0809: | | |
| | | | | | | | 1, H0689: 1, H0684: 1, | | |
| | | | | | | | H0659: 1, H0648: 1, H0672: | | |
| | | | | | | | 1, H0518: 1, H0521: 1, | | |
| | | | | | | | S0027: 1, L0744: 1, L0754: | | |
| | | | | | | | 1, L0745: 1, L0747: 1, | | |
| | | | | | | | L0780: 1, L0753: 1, L0758: | | |
| | | | | | | | 1, L0759: 1, S0436: 1, | | |
| | | | | | | | L0592: 1, L0608: 1, S0026: | | |
| | | | | | | | 1, H0543: 1, H0423: 1 and | | |
| | | | | | | | H0422: 1. | | |
| | HFPKB52 | 1307138 | 149 | 24-197 | 342 | | | | |
| | HFPKB52 | 1306234 | 150 | 3-365 | 343 | | | | |
| 31 | HGARX38 | 1306709 | 41 | 79-516 | 234 | Arg-22 to Arg-37, | S0408: 1 | | |
| | | | | | | Tyr-75 to Asp-82, | | | |
| | | | | | | Ser-98 to Trp-103, | | | |
| | | | | | | Gly-121 to Thr-126. | | | |
| 32 | HMAGO59 | 1336115 | 42 | 100-381 | 235 | | H0521: 71, S0002: 23, | | |
| | | | | | | | H0522: 20, H0638: 9, H0641: | | |
| | | | | | | | 9, S0278: 7, L0659: 7, S0360: | | |
| | | | | | | | 5, S0426: 5, L0766: 4, | | |
| | | | | | | | L0748: 4, H0716: 3, S0344: | | |
| | | | | | | | 3, L0775: 3, L0666: 3, | | |
| | | | | | | | L0665: 3, H0662: 2, H0581: | | |
| | | | | | | | 2, S0144: 2, S0142: 2, L0770: | | |
| | | | | | | | 2, L0372: 2, L0764: 2, | | |
| | | | | | | | L0655: 2, L0663: 2, H0710: | | |
| | | | | | | | 2, S0406: 2, H0556: 1, | | |
| | | | | | | | L0785: 1, H0663: 1, S0442: | | |
| | | | | | | | 1, S0376: 1, S0408: 1, S0410: | | |
| | | | | | | | 1, S0474: 1, L0483: 1, | | |
| | | | | | | | H0644: 1, H0673: 1, S0440: | | |
| | | | | | | | 1, L0667: 1, L0646: 1, | | |
| | | | | | | | L0642: 1, L0648: 1, L0649: | | |
| | | | | | | | 1, L0805: 1, L0776: 1, | | |
| | | | | | | | L0607: 1, L0754: 1, L0777: | | |
| | | | | | | | 1, L0780: 1, L0731: 1, | | |
| | | | | | | | L0596: 1, L0599: 1 and | | |
| | | | | | | | L0604: 1. | | |
| | HMAGO59 | 1307452 | 151 | 100-381 | 344 | Tyr-54 to Pro-61, | H0521: 71, S0002: 23, | | |
| | | | | | | Arg-71 to Ala-77. | H0522: 20, H0638: 9, H0641: | | |
| | | | | | | | 9, S0278: 7, L0659: 7, S0360: | | |
| | | | | | | | 5, S0426: 5, L0766: 4, | | |
| | | | | | | | L0748: 4, H0716: 3, S0344: | | |
| | | | | | | | 3, L0775: 3, L0666: 3, | | |
| | | | | | | | L0665: 3, H0662: 2, H0581: | | |
| | | | | | | | 2, S0144: 2, S0142: 2, L0770: | | |
| | | | | | | | 2, L0372: 2, L0764: 2, | | |
| | | | | | | | L0655: 2, L0663: 2, H0710: | | |
| | | | | | | | 2, S0406: 2, H0556: 1, | | |
| | | | | | | | L0785: 1, H0663: 1, S0442: | | |
| | | | | | | | 1, S0376: 1, S0408: 1, S0410: | | |
| | | | | | | | 1, S0474: 1, L0483: 1, | | |
| | | | | | | | H0644: 1, H0673: 1, S0440: | | |
| | | | | | | | 1, L0667: 1, L0646: 1, | | |
| | | | | | | | L0642: 1, L0648: 1, L0649: | | |
| | | | | | | | 1, L0805: 1, L0776: 1, | | |
| | | | | | | | L0607: 1, L0754: 1, L0777: | | |
| | | | | | | | 1, L0780: 1, L0731: 1, | | |
| | | | | | | | L0596: 1, L0599: 1 and | | |
| | | | | | | | L0604: 1. | | |
| | HMAGO59 | 1307454 | 152 | 62-343 | 345 | Tyr-54 to Pro-61, | | | |
| | | | | | | Arg-71 to Ala-77. | | | |
| | HMAGO59 | 1307450 | 153 | 129-272 | 346 | | | | |
| 33 | HMTSX03 | 1335783 | 43 | 23-1498 | 236 | | H0742: 2 | | |
| | HMTSX03 | 1305931 | 154 | 6-623 | 347 | Arg-21 to Asn-28, | H0742: 2 | | |
| | | | | | | Tyr-90 to Gly-98, | | | |
| | | | | | | Thr-143 to Glu-148, | | | |
| | | | | | | Glu-155 to Cys-164, | | | |
| | | | | | | Asn-185 to | | | |
| | | | | | | Asp-193. | | | |
| 34 | HMTUZ60 | 1306331 | 44 | 45-389 | 237 | | H0742: 1 | | |
| 35 | HNFKC14 | 1306655 | 45 | 143-406 | 238 | Leu-80 to Ser-88. | H0719: 1 | | |
| | HNFKC14 | 1306713 | 155 | 163-447 | 348 | Leu-80 to Lys-95. | | | |
| 36 | HNSQN50 | 1322736 | 46 | 81-1577 | 239 | | S0408: 6, S0442: 3, L0748: | | |
| | | | | | | | 3, S0354: 2, S0444: 2, | | |
| | | | | | | | H0730: 1, H0036: 1, H0246: | | |
| | | | | | | | 1, H0059: 1, H0144: 1, | | |
| | | | | | | | S0374: 1, L0749: 1 and | | |
| | | | | | | | S0436: 1. | | |
| | HNSQN50 | 1306007 | 156 | 109-1041 | 349 | Ala-32 to Asn-37, | S0408: 6, S0442: 3, L0748: | | |
| | | | | | | Ala-89 to Glu-101, | 3, S0354: 2, S0444: 2, | | |
| | | | | | | Gly-116 to Pro-126. | H0730: 1, H0036: 1, H0246: | | |
| | | | | | | | 1, H0059: 1, H0144: 1, | | |
| | | | | | | | S0374: 1, L0749: 1 and | | |
| | | | | | | | S0436: 1. | | |
| | HNSQN50 | 1306650 | 157 | 236-532 | 350 | Glu-3 to Gly-17, | | | |
| | | | | | | Arg-37 to Pro-45, | | | |
| | | | | | | Pro-59 to Pro-64. | | | |
| 37 | HNSUM63 | 1306687 | 47 | 126-743 | 240 | Gly-90 to Tyr-97, | L0774: 6, H0033: 1, H0424: | | |
| | | | | | | Ser-110 to Arg-117, | 1, H0213: 1, H0401: 1, | | |
| | | | | | | Pro-139 to Leu-151, | H0553: 1, L0804: 1, L0775: | | |
| | | | | | | Pro-165 to Glu-173, | 1, L0776: 1, L0659: 1, | | |
| | | | | | | Thr-186 to Cys-194. | L0519: 1, L0663: 1 and | | |
| | | | | | | | S0436: 1. | | |
| | HNSUM63 | 1306714 | 158 | 142-759 | 351 | Gly-90 to Tyr-97, | | | |
| | | | | | | Ser-110 to Arg-117, | | | |
| | | | | | | Pro-139 to Leu-151, | | | |
| | | | | | | Pro-165 to Glu-173, | | | |
| | | | | | | Thr-186 to Cys-194. | | | |
| 38 | HNSWV68 | 1306700 | 48 | 710-1300 | 241 | Ala-25 to Ser-35, | L0770: 11, L0751: 9, | 20pter-cen | |
| | | | | | | Cys-58 to Phe-63, | L0769: 5, L0439: 5, H0144: | | |
| | | | | | | Lys-83 to Trp-90, | 4, L0758: 4, S0436: 4, | | |
| | | | | | | Pro-92 to Asn-99, | L0764: 3, L0766: 3, L0806: | | |
| | | | | | | Pro-101 to Phe-108, | 3, L0740: 3, S0222: 2, S0010: | | |
| | | | | | | Pro-111 to Cys-119, | 2, H0012: 2, H0031: 2, | | |
| | | | | | | Glu-186 to Ile-192. | H0413: 2, L0662: 2, L0659: | | |
| | | | | | | | 2, L0665: 2, S0216: 2, | | |
| | | | | | | | L0438: 2, H0435: 2, S0206: | | |
| | | | | | | | 2, L0748: 2, L0747: 2, | | |
| | | | | | | | L0749: 2, L0757: 2, L0599: | | |
| | | | | | | | 2, H0556: 1, S0040: 1, | | |
| | | | | | | | S0418: 1, S0420: 1, S0442: 1, | | |
| | | | | | | | S0354: 1, H0730: 1, H0735: | | |
| | | | | | | | 1, H0747: 1, S0132: 1, | | |
| | | | | | | | L0717: 1, H0586: 1, H0632: | | |
| | | | | | | | 1, T0114: 1, H0250: 1, | | |
| | | | | | | | S0280: 1, H0744: 1, L0157: | | |
| | | | | | | | 1, H0014: 1, S0051: 1, | | |
| | | | | | | | S0003: 1, H0644: 1, H0038: | | |
| | | | | | | | 1, H0646: 1, S0002: 1, | | |
| | | | | | | | H0529: 1, L0369: 1, L0763: | | |
| | | | | | | | 1, L5565: 1, L0642: 1, | | |
| | | | | | | | L0645: 1, L0768: 1, L0774: | | |
| | | | | | | | 1, L0807: 1, L0365: 1, | | |
| | | | | | | | L0647: 1, L5623: 1, L0666: | | |
| | | | | | | | 1, S0052: 1, L0565: 1, | | |
| | | | | | | | H0682: 1, H0658: 1, H0478: | | |
| | | | | | | | 1, S0037: 1, S3014: 1, L0754: | | |
| | | | | | | | 1, L0750: 1, L0759: 1, | | |
| | | | | | | | S0011: 1, S0192: 1 and | | |
| | | | | | | | H0352: 1. | | |
| 39 | HOC2T95 | 1324137 | 49 | 172-675 | 242 | | S0408: 7, S0444: 6, S0358: | | |
| | | | | | | | 3, H0597: 2, S0442: 1, | | |
| | | | | | | | S0374: 1 and S0434: 1. | | |
| | HOC2T95 | 1306715 | 159 | 65-568 | 352 | Arg-22 to Arg-37, | S0408: 7, S0444: 6, S0358: | | |
| | | | | | | Val-76 to Asp-82, | 3, H0597: 2, S0442: 1, | | |
| | | | | | | Ser-98 to Trp-103, | S0374: 1 and S0434: 1. | | |
| | | | | | | Gly-121 toThr-126. | | | |
| 40 | HODNV05 | 1306656 | 50 | 86-352 | 243 | Cys-49 to Phe-60, | S0442: 1 and H0014: 1. | | |
| | | | | | | Leu-73 to Ser-79. | | | |
| | HODNV05 | 1306717 | 160 | 102-368 | 353 | Cys-49 to Phe-60, | | | |
| | | | | | | Leu-73 to Ser-79. | | | |
| 41 | HPDSA48 | 1332325 | 51 | 45-137 | 244 | | L0809: 7, H0581: 3, L0658: | | |
| | | | | | | | 3, H0402: 2, L0769: 2, | | |
| | | | | | | | L0375: 2, L0783: 2, L0665: | | |
| | | | | | | | 2, S0052: 2, H0689: 2, | | |
| | | | | | | | H0648: 2, S0328: 2, H0696: | | |
| | | | | | | | 2, L0747: 2, H0657: 1, | | |
| | | | | | | | H0255: 1, H0741: 1, H0747: | | |
| | | | | | | | 1, L0717: 1, H0632: 1, | | |
| | | | | | | | H0486: 1, H0748: 1, H0231: | | |
| | | | | | | | 1, H0327: 1, H0545: 1, | | |
| | | | | | | | T0023: 1, T0086: 1, H0674: | | |
| | | | | | | | 1, H0316: 1, T0041: 1, | | |
| | | | | | | | L0764: 1, L0662: 1, L0768: | | |
| | | | | | | | 1, L0794: 1, L0803: 1, | | |
| | | | | | | | L0650: 1, L0805: 1, L0776: | | |
| | | | | | | | 1, L0629: 1, L0647: 1, | | |
| | | | | | | | L0790: 1, L0791: 1, L0666: | | |
| | | | | | | | 1, L0664: 1, S0330: 1, | | |
| | | | | | | | L0740: 1, L0751: 1, L0750: | | |
| | | | | | | | 1, L0777: 1, L0753: 1, | | |
| | | | | | | | L0755: 1, L0731: 1 and | | |
| | | | | | | | H0352: 1. | | |
| | HPDSA48 | 1306302 | 161 | 78-431 | 354 | Asp-31 to Phe-42, | L0809: 7, H0581: 3, L0658: | | |
| | | | | | | Ser-52 to Cys-58. | 3, H0402: 2, L0769: 2, | | |
| | | | | | | | L0375: 2, L0783: 2, L0665: | | |
| | | | | | | | 2, S0052: 2, H0689: 2, | | |
| | | | | | | | H0648: 2, S0328: 2, H0696: | | |
| | | | | | | | 2, L0747: 2, H0657: 1, | | |
| | | | | | | | H0255: 1, H0741: 1, H0747: | | |
| | | | | | | | 1, L0717: 1, H0632: 1, | | |
| | | | | | | | H0486: 1, H0748: 1, H0231: | | |
| | | | | | | | 1, H0327: 1, H0545: 1, | | |
| | | | | | | | T0023: 1, T0086: 1, H0674: | | |
| | | | | | | | 1, H0316: 1, T0041: 1, | | |
| | | | | | | | L0764: 1, L0662: 1, L0768: | | |
| | | | | | | | 1, L0794: 1, L0803: 1, | | |
| | | | | | | | L0650: 1, L0805: 1, L0776: | | |
| | | | | | | | 1, L0629: 1, L0647: 1, | | |
| | | | | | | | L0790: 1, L0791: 1, L0666: | | |
| | | | | | | | 1, L0664: 1, S0330: 1, | | |
| | | | | | | | L0740: 1, L0751: 1, L0750: | | |
| | | | | | | | 1, L0777: 1, L0753: 1, | | |
| | | | | | | | L0755: 1, L0731: 1 and | | |
| | | | | | | | H0352: 1. | | |
| | HPDSA48 | 1306617 | 162 | 78-431 | 355 | Asp-31 to Phe-42, | | | |
| | | | | | | Ser-52 to Cys-58. | | | |
| 42 | HSKIT24 | 1320220 | 52 | 30-1631 | 245 | | L0747: 11, S0360: 5, | | |
| | | | | | | | H0551: 4, L0764: 4, L0783: | | |
| | | | | | | | 4, H0013: 3, L0770: 3, | | |
| | | | | | | | L0775: 3, L0438: 3, S0037: | | |
| | | | | | | | 3, L0779: 3, L0757: 3, | | |
| | | | | | | | L0599: 3, H0295: 2, S0003: | | |
| | | | | | | | 2, H0628: 2, L0369: 2, | | |
| | | | | | | | L0763: 2, L0772: 2, L0378: | | |
| | | | | | | | 2, L0509: 2, L0776: 2, | | |
| | | | | | | | L0666: 2, H0521: 2, S3014: | | |
| | | | | | | | 2, L0439: 2, L0755: 2, | | |
| | | | | | | | L0731: 2, S0436: 2, L0588: | | |
| | | | | | | | 2, L0601: 2, T0049: 1, | | |
| | | | | | | | H0656: 1, S0212: 1, H0638: | | |
| | | | | | | | 1, S0420: 1, S0408: 1, S0046: | | |
| | | | | | | | 1, S0476: 1, H0497: 1, | | |
| | | | | | | | L3816: 1, L3817: 1, H0486: | | |
| | | | | | | | 1, H0309: 1, H0544: 1, | | |
| | | | | | | | H0545: 1, H0024: 1, S0250: | | |
| | | | | | | | 1, H0644: 1, H0617: 1, | | |
| | | | | | | | H0038: 1, H0040: 1, S0294: | | |
| | | | | | | | 1, L0065: 1, H0633: 1, | | |
| | | | | | | | H0646: 1, S0144: 1, L0372: | | |
| | | | | | | | 1, L0648: 1, L0768: 1, | | |
| | | | | | | | L0649: 1, L0805: 1, L0654: | | |
| | | | | | | | 1, L0657: 1, L0513: 1, | | |
| | | | | | | | L0656: 1, L0659: 1, L0517: | | |
| | | | | | | | 1, L5623: 1, L4501: 1, | | |
| | | | | | | | L2261: 1, H0144: 1, L0352: | | |
| | | | | | | | 1, S0126: 1, H0690: 1, | | |
| | | | | | | | H0683: 1, H0658: 1, H0672: | | |
| | | | | | | | 1, H0539: 1, S0380: 1, | | |
| | | | | | | | H0528: 1, H0478: 1, H0631: | | |
| | | | | | | | 1, S3012: 1, L0749: 1, | | |
| | | | | | | | L0752: 1, L0758: 1, S0434: | | |
| | | | | | | | 1, H0665: 1, S0192: 1 and | | |
| | | | | | | | S0424: 1. | | |
| | HSKIT24 | 1308800 | 163 | 20-607 | 356 | | L0747: 11, S0360: 5, | | 121050, 131400, |
| | | | | | | | H0551: 4, L0764: 4, L0783: | | 138040, 153455, |
| | | | | | | | 4, H0013: 3, L0770: 3, | | 159000, 179095, |
| | | | | | | | L0775: 3, L0438: 3, S0037: | | 181460, 192974, |
| | | | | | | | 3, L0779: 3, L0757: 3, | | 192974, 600807, |
| | | | | | | | L0599: 3, H0295: 2, S0003: | | 601596, 601692, |
| | | | | | | | 2, H0628: 2, L0369: 2, | | 601692, 601692, |
| | | | | | | | L0763: 2, L0772: 2, L0378: | | 601692, 602089, |
| | | | | | | | 2, L0509: 2, L0776: 2, | | 602121, 602460 |
| | | | | | | | L0666: 2, H0521: 2, S3014: | | |
| | | | | | | | 2, L0439: 2, L0755: 2, | | |
| | | | | | | | L0731: 2, S0436: 2, L0588: | | |
| | | | | | | | 2, L0601: 2, T0049: 1, | | |
| | | | | | | | H0656: 1, S0212: 1, H0638: | | |
| | | | | | | | 1, S0420: 1, S0408: 1, S0046: | | |
| | | | | | | | 1, S0476: 1, H0497: 1, | | |
| | | | | | | | L3816: 1, L3817: 1, H0486: | | |
| | | | | | | | 1, H0309: 1, H0544: 1, | | |
| | | | | | | | H0545: 1, H0024: 1, S0250: | | |
| | | | | | | | 1, H0644: 1, H0617: 1, | | |
| | | | | | | | H0038: 1, H0040: 1, S0294: | | |
| | | | | | | | 1, L0065: 1, H0633: 1, | | |
| | | | | | | | H0646: 1, S0144: 1, L0372: | | |
| | | | | | | | 1, L0648: 1, L0768: 1, | | |
| | | | | | | | L0649: 1, L0805: 1, L0654: | | |
| | | | | | | | 1, L0657: 1, L0513: 1, | | |
| | | | | | | | L0656: 1, L0659: 1, L0517: | | |
| | | | | | | | 1, L5623: 1, L4501: 1, | | |
| | | | | | | | L2261: 1, H0144: 1, L0352: | | |
| | | | | | | | 1, S0126: 1, H0690: 1, | | |
| | | | | | | | H0683: 1, H0658: 1, H0672: | | |
| | | | | | | | 1, H0539: 1, S0380: 1, | | |
| | | | | | | | H0528: 1, H0478: 1, H0631: | | |
| | | | | | | | 1, S3012: 1, L0749: 1, | | |
| | | | | | | | L0752: 1, L0758: 1, S0434: | | |
| | | | | | | | 1, H0665: 1, S0192: 1 and | | |
| | | | | | | | S0424: 1. | | |
| | HSKIT24 | 1308801 | 164 | 90-1460 | 357 | Asp-141 to Pro-147, | | | |
| | | | | | | Arg-174 to Tyr-183, | | | |
| | | | | | | Gly-199 to Lys-206, | | | |
| | | | | | | Pro-238 to Gly-245, | | | |
| | | | | | | Leu-254 to Glu-267, | | | |
| | | | | | | Pro-285 to Tyr-290, | | | |
| | | | | | | Thr-302 to Arg-308, | | | |
| | | | | | | Tyr-313 to Ala-319, | | | |
| | | | | | | Lys-328 to Asp-334, | | | |
| | | | | | | Ser-385 to Asp-391. | | | |
| | HSKIT24 | 1308799 | 165 | 107-397 | 358 | Gly-55 to Ala-64, | | | |
| | | | | | | Glu-82 to Phe-87. | | | |
| 43 | HSVAA83 | 1320217 | 53 | 102-839 | 246 | | H0521: 100, H0522: 33, | | |
| | | | | | | | H0445: 16, L0748: 15, | | |
| | | | | | | | S0360: 11, H0553: 7, H0575: | | |
| | | | | | | | 6, L0754: 6, S0434: 6, S0354: | | |
| | | | | | | | 4, H0638: 3, S0358: 3, | | |
| | | | | | | | H0427: 3, H0039: 3, H0622: | | |
| | | | | | | | 3, H0644: 3, H0090: 3, | | |
| | | | | | | | H0264: 3, S0438: 3, S0374: | | |
| | | | | | | | 3, L0743: 3, L0744: 3, | | |
| | | | | | | | L0747: 3, L0755: 3, S0436: | | |
| | | | | | | | 3, S0376: 2, S0408: 2, | | |
| | | | | | | | H0309: 2, H0009: 2, H0620: | | |
| | | | | | | | 2, H0376: 2, H0063: 2, | | |
| | | | | | | | L0769: 2, L0659: 2, H0658: | | |
| | | | | | | | 2, H0672: 2, H0555: 2, | | |
| | | | | | | | L0581: 2, H0713: 1, H0583: | | |
| | | | | | | | 1, L0418: 1, L0785: 1, | | |
| | | | | | | | S0212: 1, S0282: 1, H0661: | | |
| | | | | | | | 1, H0663: 1, L0005: 1, | | |
| | | | | | | | S0442: 1, H0619: 1, L3388: | | |
| | | | | | | | 1, S0280: 1, H0108: 1, | | |
| | | | | | | | H0122: 1, H0581: 1, H0597: | | |
| | | | | | | | 1, H0570: 1, H0123: 1, | | |
| | | | | | | | H0023: 1, H0014: 1, S0362: | | |
| | | | | | | | 1, H0510: 1, H0375: 1, | | |
| | | | | | | | H0252: 1, H0213: 1, H0031: | | |
| | | | | | | | 1, H0189: 1, H0163: 1, | | |
| | | | | | | | L0435: 1, S0440: 1, L0646: | | |
| | | | | | | | 1, L0765: 1, L0648: 1, | | |
| | | | | | | | L0768: 1, L0378: 1, L0805: | | |
| | | | | | | | 1, L0559: 1, L0789: 1, | | |
| | | | | | | | H0726: 1, L0352: 1, H0682: | | |
| | | | | | | | 1, H0666: 1, S0330: 1, | | |
| | | | | | | | S0378: 1, H0754: 1, H0710: | | |
| | | | | | | | 1, S0190: 1, S0406: 1, | | |
| | | | | | | | H0345: 1, L0439: 1, L0751: | | |
| | | | | | | | 1, L0749: 1, L0750: 1, | | |
| | | | | | | | L0779: 1, L0731: 1, L0759: | | |
| | | | | | | | 1, H0444: 1, H0343: 1, | | |
| | | | | | | | H0595: 1, S0106: 1, H0668: | | |
| | | | | | | | 1, S0384: 1, H0506: 1 and | | |
| | | | | | | | H0352: 1. | | |
| | HSVAA83 | 1308894 | 166 | 94-633 | 359 | Arg-25 to Gly-31, | H0521: 100, H0522: 33, | | |
| | | | | | | Pro-45 to Gly-52, | H0445: 16, L0748: 15, | | |
| | | | | | | Pro-71 to Gly-76, | S0360: 11, H0553: 7, H0575: | | |
| | | | | | | Pro-81 to Gly-91, | 6, L0754: 6, S0434: 6, S0354: | | |
| | | | | | | Glu-107 to Phe-118. | 4, H0638: 3, S0358: 3, | | |
| | | | | | | | H0427: 3, H0039: 3, H0622: | | |
| | | | | | | | 3, H0644: 3, H0090: 3, | | |
| | | | | | | | H0264: 3, S0438: 3, S0374: | | |
| | | | | | | | 3, L0743: 3, L0744: 3, | | |
| | | | | | | | L0747: 3, L0755: 3, S0436: | | |
| | | | | | | | 3, S0376: 2, S0408: 2, | | |
| | | | | | | | H0309: 2, H0009: 2, H0620: | | |
| | | | | | | | 2, H0376: 2, H0063: 2, | | |
| | | | | | | | L0769: 2, L0659: 2, H0658: | | |
| | | | | | | | 2, H0672: 2, H0555: 2, | | |
| | | | | | | | L0581: 2, H0713: 1, H0583: | | |
| | | | | | | | 1, L0418: 1, L0785: 1, | | |
| | | | | | | | S0212: 1, S0282: 1, H0661: | | |
| | | | | | | | 1, H0663: 1, L0005: 1, | | |
| | | | | | | | S0442: 1, H0619: 1, L3388: | | |
| | | | | | | | 1, S0280: 1, H0108: 1, | | |
| | | | | | | | H0122: 1, H0581: 1, H0597: | | |
| | | | | | | | 1, H0570: 1, H0123: 1, | | |
| | | | | | | | H0023: 1, H0014: 1, S0362: | | |
| | | | | | | | 1, H0510: 1, H0375: 1, | | |
| | | | | | | | H0252: 1, H0213: 1, H0031: | | |
| | | | | | | | 1, H0189: 1, H0163: 1, | | |
| | | | | | | | L0435: 1, S0440: 1, L0646: | | |
| | | | | | | | 1, L0765: 1, L0648: 1, | | |
| | | | | | | | L0768: 1, L0378: 1, L0805: | | |
| | | | | | | | 1, L0559: 1, L0789: 1, | | |
| | | | | | | | H0726: 1, L0352: 1, H0682: | | |
| | | | | | | | 1, H0666: 1, S0330: 1, | | |
| | | | | | | | S0378: 1, H0754: 1, H0710: | | |
| | | | | | | | 1, S0190: 1, S0406: 1, | | |
| | | | | | | | H0345: 1, L0439: 1, L0751: | | |
| | | | | | | | 1, L0749: 1, L0750: 1, | | |
| | | | | | | | L0779: 1, L0731: 1, L0759: | | |
| | | | | | | | 1, H0444: 1, H0343: 1, | | |
| | | | | | | | H0595: 1, S0106: 1, H0668: | | |
| | | | | | | | 1, S0384: 1, H0506: 1 and | | |
| | | | | | | | H0352: 1. | | |
| | HSVAA83 | 1313494 | 167 | 119-457 | 360 | Arg-25 to Gly-31, | | | |
| | | | | | | Pro-45 to Gly-52, | | | |
| | | | | | | Pro-71 to Gly-76, | | | |
| | | | | | | Pro-81 to Gly-91, | | | |
| | | | | | | Glu-107 to Phe-118. | | | |
| | HSVAA83 | 1313491 | 168 | 119-856 | 361 | Arg-25 to Gly-31, | | | |
| | | | | | | Pro-45 to Gly-52, | | | |
| | | | | | | Pro-71 to Gly-76, | | | |
| | | | | | | Pro-81 to Gly-91, | | | |
| | | | | | | Glu-107 to Phe-118. | | | |
| | HSVAA83 | 1313490 | 169 | 118-855 | 362 | Arg-25 to Gly-31, | | | |
| | | | | | | pro-45 to Gly-52, | | | |
| | | | | | | Pro-71 to Gly-76, | | | |
| | | | | | | Pro-81 to Gly-91, | | | |
| | | | | | | Glu-107 to Phe-118. | | | |
| 44 | HUTJT76 | 1322752 | 54 | 31-954 | 247 | | S0358: 8, H0457: 6, L0777: | | |
| | | | | | | | 6, S0436: 6, L0748: 5, | | |
| | | | | | | | H0156: 4, L0776: 4, L0439: | | |
| | | | | | | | 4, H0341: 3, S0418: 3, | | |
| | | | | | | | S0142: 3, L0758: 3, H0685: | | |
| | | | | | | | 2, S0420: 2, S0046: 2, | | |
| | | | | | | | H0370: 2, H0545: 2, H0012: | | |
| | | | | | | | 2, H0617: 2, H0264: 2, | | |
| | | | | | | | H0494: 2, L0769: 2, L0766: | | |
| | | | | | | | 2, L0775: 2, H0660: 2, | | |
| | | | | | | | H0539: 2, L0747: 2, L0731: | | |
| | | | | | | | 2, L0596: 2, H0422: 2, | | |
| | | | | | | | H0506: 2, H0265: 1, H0556: | | |
| | | | | | | | 1, H0140: 1, H0661: 1, | | |
| | | | | | | | H0662: 1, H0638: 1, S0356: | | |
| | | | | | | | 1, S0444: 1, S0410: 1, | | |
| | | | | | | | H0729: 1, H0722: 1, H0728: | | |
| | | | | | | | 1, H0393: 1, S0278: 1, | | |
| | | | | | | | H0549: 1, H0231: 1, L0738: | | |
| | | | | | | | 1, H0081: 1, L0471: 1, | | |
| | | | | | | | H0620: 1, S0051: 1, H0083: | | |
| | | | | | | | 1, H0594: 1, H0031: 1, | | |
| | | | | | | | H0181: 1, H0673: 1, H0135: | | |
| | | | | | | | 1, H0038: 1, H0551: 1, | | |
| | | | | | | | S0440: 1, S0150: 1, S0422: 1, | | |
| | | | | | | | L0763: 1, L0372: 1, L0800: | | |
| | | | | | | | 1, L0553: 1, L0773: 1, | | |
| | | | | | | | L0768: 1, L0774: 1, L0805: | | |
| | | | | | | | 1, L0655: 1, L0518: 1, | | |
| | | | | | | | L0783: 1, L0809: 1, L0519: | | |
| | | | | | | | 1, L2260: 1, S0374: 1, | | |
| | | | | | | | H0593: 1, H0690: 1, H0666: | | |
| | | | | | | | 1, S0392: 1, L0750: 1, | | |
| | | | | | | | L0759: 1, S0434: 1 and | | |
| | | | | | | | H0543: 1. | | |
| | HUTJT76 | 1307189 | 170 | 14-424 | 363 | Gly-56 to Asp-67, | S0358: 8, H0457: 6, L0777: | | |
| | | | | | | Tyr-118 to Pro-127. | 6, S0436: 6, L0748: 5, | | |
| | | | | | | | H0156: 4, L0776: 4, L0439: | | |
| | | | | | | | 4, H0341: 3, S0418: 3, | | |
| | | | | | | | S0142: 3, L0758: 3, H0685: | | |
| | | | | | | | 2, S0420: 2, S0046: 2, | | |
| | | | | | | | H0370: 2, H0545: 2, H0012: | | |
| | | | | | | | 2, H0617: 2, H0264: 2, | | |
| | | | | | | | H0494: 2, L0769: 2, L0766: | | |
| | | | | | | | 2, L0775: 2, H0660: 2, | | |
| | | | | | | | H0539: 2, L0747: 2, L0731: | | |
| | | | | | | | 2, L0596: 2, H0422: 2, | | |
| | | | | | | | H0506: 2, H0265: 1, H0556: | | |
| | | | | | | | 1, H0140: 1, H0661: 1, | | |
| | | | | | | | H0662: 1, H0638: 1, S0356: | | |
| | | | | | | | 1, S0444: 1, S0410: 1, | | |
| | | | | | | | H0729: 1, H0722: 1, H0728: | | |
| | | | | | | | 1, H0393: 1, S0278: 1, | | |
| | | | | | | | H0549: 1, H0231: 1, L0738: | | |
| | | | | | | | 1, H0081: 1, L0471: 1, | | |
| | | | | | | | H0620: 1, S0051: 1, H0083: | | |
| | | | | | | | 1, H0594: 1, H0031: 1, | | |
| | | | | | | | H0181: 1, H0673: 1, H0135: | | |
| | | | | | | | 1, H0038: 1, H0551: 1, | | |
| | | | | | | | S0440: 1, S0150: 1, S0422: 1, | | |
| | | | | | | | L0763: 1, L0372: 1, L0800: | | |
| | | | | | | | 1, L0553: 1, L0773: 1, | | |
| | | | | | | | L0768: 1, L0774: 1, L0805: | | |
| | | | | | | | 1, L0655: 1, L0518: 1, | | |
| | | | | | | | L0783: 1, L0809: 1, L0519: | | |
| | | | | | | | 1, L2260: 1, S0374: 1, | | |
| | | | | | | | H0593: 1, H0690: 1, H0666: | | |
| | | | | | | | 1, S0392: 1, L0750: 1, | | |
| | | | | | | | L0759: 1, S0434: 1 and | | |
| | | | | | | | H0543: 1. | | |
| | HUTJT76 | 1313865 | 171 | 14-937 | 364 | Gly-56 to Asp-67, | | | |
| | | | | | | Tyr-118 to Pro-127, | | | |
| | | | | | | Pro-136 to Asp-142, | | | |
| | | | | | | Pro-162 to Pro-168, | | | |
| | | | | | | Gly-213 to Pro-218, | | | |
| | | | | | | Ala-262 to Ala-267, | | | |
| | | | | | | Phe-270 to Gly-278, | | | |
| | | | | | | Pro-296 to Glu-301 | | | |
| 45 | HUVHZ75 | 1336588 | 55 | 109-237 | 248 | | H0623: 1 | | |
| | HUVHZ75 | 1307428 | 172 | 199-369 | 365 | Ser-36 to Arg-44, | H0623: 1 | | |
| | | | | | | Ile-46 to Pro-52. | | | |
| 46 | HVAQO59 | 1318530 | 56 | 67-747 | 249 | | H0478: 16, S0330: 14, | | |
| | | | | | | | S0392: 9, S0328: 8, H0032: | | |
| | | | | | | | 4, S0044: 3, H0402: 2, | | |
| | | | | | | | H0479: 2, H0263: 1, H0011: | | |
| | | | | | | | 1, H0096: 1, H0708: 1, | | |
| | | | | | | | S0464: 1, S0150: 1, H0517: | | |
| | | | | | | | 1, H0593: 1, H0670: 1, | | |
| | | | | | | | S0380: 1, H0448: 1, S0434: 1 | | |
| | | | | | | | and H0542: 1. | | |
| | HVAQO59 | 1293499 | 173 | 96-260 | 366 | Pro-5 to Val-12, | H0478: 16, S0330: 14, | | |
| | | | | | | Pro-33 to Val-43. | S0392: 9, S0328: 8, H0032: | | |
| | | | | | | | 4, S0044: 3, H0402: 2, | | |
| | | | | | | | H0479: 2, H0263: 1, H0011: | | |
| | | | | | | | 1, H0096: 1, H0708: 1, | | |
| | | | | | | | S0464: 1, S0150: 1, H0517: | | |
| | | | | | | | 1, H0593: 1, H0670: 1, | | |
| | | | | | | | S0380: 1, H0448: 1, S0434: 1 | | |
| | | | | | | | and H0542: 1. | | |
| 47 | HWHPA16 | 1306589 | 57 | 26-283 | 250 | Pro-28 to Glu-35, | H0587: 3, L0747: 2, L0376: | | |
| | | | | | | Ala-80 to Gln-85. | 1 and S0330: 1. | | |
| | HWHPA16 | 1307291 | 174 | 20-277 | 367 | Pro-28 to Glu-35, | | | |
| | | | | | | Ala-80 to Gln-85. | | | |
| 48 | HYCAD48 | 1334177 | 58 | 70-1074 | 251 | | H0704: 2 and L0362: 2. | | |
| | HYCAD48 | 1305993 | 175 | 59-1063 | 368 | Gln-31 to Trp-47, | H0704: 2 and L0362: 2. | | |
| | | | | | | His-62 to Gln-70, | | | |
| | | | | | | Met-83 to Phe-88, | | | |
| | | | | | | Asn-93 to Arg-104, | | | |
| | | | | | | Val-118 to Gly-124, | | | |
| | | | | | | Val-129 to Gly-136, | | | |
| | | | | | | Ser-170 to Asn-179, | | | |
| | | | | | | Pro-203 to Lys-212, | | | |
| | | | | | | Pro-267 to Asn-273, | | | |
| | | | | | | Tyr-285 to Lys-294, | | | |
| | | | | | | Lys-316 to Cys-322. | | | |
| 49 | HHFZF42 | 1305981 | 59 | 188-475 | 252 | | S0140: 11, H0549: 3, | | 141750, 141800, |
| | | | | | | | S0474: 3, L0493: 3, S0436: 3, | | 141800, 141800, |
| | | | | | | | H0624: 2, H0662: 2, S0418: | | 141800, 141850, |
| | | | | | | | 2, S0278: 2, H0427: 2, | | 141850, 141850, |
| | | | | | | | H0050: 2, L0471: 2, H0622: | | 141850, 141850, |
| | | | | | | | 2, L0770: 2, L0662: 2, | | 156850, 186580, |
| | | | | | | | L0794: 2, L0809: 2, L0748: | | 191092, 600140, |
| | | | | | | | 2, L0779: 2, L0731: 2, | | 600273, 601313, |
| | | | | | | | H0170: 1, H0717: 1, H0650: | | 601785 |
| | | | | | | | 1, H0656: 1, S0001: 1, | | |
| | | | | | | | S0360: 1, H0580: 1, L0717: | | |
| | | | | | | | 1, H0586: 1, L0623: 1, | | |
| | | | | | | | T0039: 1, H0599: 1, H0575: | | |
| | | | | | | | 1, H0706: 1, H0597: 1, | | |
| | | | | | | | H0546: 1, H0123: 1, H0620: | | |
| | | | | | | | 1, H0179: 1, H0271: 1, | | |
| | | | | | | | H0687: 1, H0286: 1, H0252: | | |
| | | | | | | | 1, H0615: 1, H0428: 1, | | |
| | | | | | | | H0628: 1, H0063: 1, H0647: | | |
| | | | | | | | 1, H0649: 1, H0652: 1, | | |
| | | | | | | | L0773: 1, L0364: 1, L0775: | | |
| | | | | | | | 1, L0378: 1, L0659: 1, | | |
| | | | | | | | L0526: 1, L5622: 1, L0663: | | |
| | | | | | | | 1, L2654: 1, S0126: 1, | | |
| | | | | | | | H0689: 1, H0670: 1, H0521: | | |
| | | | | | | | 1, S0406: 1, H0555: 1, | | |
| | | | | | | | S3012: 1, S0037: 1, S3014: 1, | | |
| | | | | | | | S0027: 1, S0032: 1, L0747: 1, | | |
| | | | | | | | L0592: 1, L0593: 1, H0542: 1 | | |
| | | | | | | | and H0677: 1. | | |
| | HHFZF42 | 1309154 | 176 | 1-264 | 369 | | | | |
| 50 | HHAQY41 | 1306357 | 60 | 217-465 | 253 | Glu-31 to Gln-41, | S0422: 2 | | |
| | | | | | | Gly-47 to Leu-56. | | | |
| | HHAQY41 | 1306666 | 177 | 119-367 | 370 | Glu-31 to Gln-41, | | | |
| | | | | | | Gly-47 to Leu-56. | | | |
| 51 | HNSRC60 | 1323801 | 61 | 174-827 | 254 | | L0740: 4, H0624: 2, S0212: | | |
| | | | | | | | 2, H0046: 2, H0615: 2, | | |
| | | | | | | | H0538: 2, L0794: 2, L3388: | | |
| | | | | | | | 1, H0586: 1, H0486: 1, | | |
| | | | | | | | H0013: 1, H0156: 1, H0024: | | |
| | | | | | | | 1, S6028: 1, H0271: 1, | | |
| | | | | | | | L0456: 1, H0488: 1, T0041: | | |
| | | | | | | | 1, T0042: 1, S0422: 1, S0426: | | |
| | | | | | | | 1, H0529: 1, L0369: 1, | | |
| | | | | | | | L0649: 1, L5623: 1, H0520: | | |
| | | | | | | | 1, H0696: 1, H0436: 1, | | |
| | | | | | | | L0748: 1, L0777: 1, L0752: | | |
| | | | | | | | 1, L0759: 1, S0436: 1, S0196: | | |
| | | | | | | | 1 and S0424: 1. | | |
| | HNSRC60 | 1306009 | 178 | 158-568 | 371 | | L0740: 4, H0624: 2, S0212: | | |
| | | | | | | | 2, H0046: 2, H0615: 2, | | |
| | | | | | | | H0538: 2, L0794: 2, L3388: | | |
| | | | | | | | 1, H0586: 1, H0486: 1, | | |
| | | | | | | | H0013: 1, H0156: 1, H0024: | | |
| | | | | | | | 1, S6028: 1, H0271: 1, | | |
| | | | | | | | L0456: 1, H0488: 1, T0041: | | |
| | | | | | | | 1, T0042: 1, S0422: 1, S0426: | | |
| | | | | | | | 1, H0529: 1, L0369: 1, | | |
| | | | | | | | L0649: 1, L5623: 1, H0520: | | |
| | | | | | | | 1, H0696: 1, H0436: 1, | | |
| | | | | | | | L0748: 1, L0777: 1, L0752: | | |
| | | | | | | | 1, L0759: 1, S0436: 1, S0196: | | |
| | | | | | | | 1 and S0424: 1. | | |
| | HNSRC60 | 1306672 | 179 | 2161-2394 | 372 | Pro-8 to Pro-14, | | | |
| | | | | | | Pro-19 to Leu-29, | | | |
| | | | | | | Arg-52 to Ala-60. | | | |
| 52 | HFDUT84 | 1315930 | 62 | 92-415 | 255 | | H0294: 1, S0110: 1, H0733: | | |
| | | | | | | | 1, S0132: 1, T0040: 1, | | |
| | | | | | | | H0183: 1, H0050: 1, H0030: | | |
| | | | | | | | 1, L0065: 1, L0807: 1, | | |
| | | | | | | | L0657: 1, L3811: 1, S0152: | | |
| | | | | | | | 1, S0406: 1 and L0747: 1. | | |
| | HFDUT84 | 1305969 | 180 | 331-654 | 373 | Pro-52 to Gln-59, | H0294: 1, S0110: 1, H0733: | 10cen-q26.11 | |
| | | | | | | Pro-61 to Ala-68, | 1, S0132: 1, T0040: 1, | | |
| | | | | | | Thr-84 to Ala-106. | H0183: 1, H0050: 1, H0030: | | |
| | | | | | | | 1, L0065: 1, L0807: 1, | | |
| | | | | | | | L0657: 1, L3811: 1, S0152: | | |
| | | | | | | | 1, S0406: 1 and L0747: 1. | | |
| 53 | HHAIS21 | 1335782 | 63 | 111-551 | 256 | | L0777: 2 and S0422: 1. | | |
| | HHAIS21 | 1305929 | 181 | 94-534 | 374 | | | | |
| 54 | HHMQL78 | 1315932 | 64 | 139-756 | 257 | | S0410: 2, H0556: 1, H0024: | | |
| | | | | | | | 1, L0803: 1, L0806: 1, | | |
| | | | | | | | L5622: 1 and L0790: 1. | | |
| | HHMQL78 | 1305936 | 182 | 538-1155 | 375 | Pro-71 to Asp-82, | S0410: 2, H0556: 1, H0024: | | |
| | | | | | | Thr-164 to Arg-172. | 1, L0803: 1, L0806: 1, | | |
| | | | | | | | L5622: 1 and L0790: 1. | | |
| 55 | HNSMZ53 | 1315502 | 65 | 52-513 | 258 | | S0436: 1 | | |
| | HNSMZ53 | 1306010 | 183 | 52-426 | 376 | Pro-3 to Arg-8. | S0436: 1 | | |
| 56 | HNGMJ63 | 1323768 | 66 | 40-339 | 259 | | S0428: 1 and H0543: 1. | | |
| | HNGMJ63 | 1306153 | 184 | 33-332 | 377 | | S0428: 1 and H0543: 1. | | |
| 57 | HNSIT44 | 1315491 | 67 | 124-639 | 260 | | S0434: 1 | | |
| | HNSIT44 | 1306002 | 185 | 124-528 | 378 | Pro-50 to Arg-56, | S0434: 1 | | |
| | | | | | | Gly-64 to Gly-72, | | | |
| | | | | | | Pro-110 to Arg-118, | | | |
| | | | | | | Pro-126 to Gly-133. | | | |
| 58 | HHMSF21 | 1306648 | 68 | 135-383 | 261 | Gln-40 to Glu-48, | S0410: 1 | | |
| | | | | | | Glu-66 to Cys-71. | | | |
| | HHMSF21 | 1306711 | 186 | 152-400 | 379 | Gln-40 to Glu-48, | | | |
| | | | | | | Glu-66 to Cys-71. | | | |
| 59 | HNSES94 | 1306632 | 69 | 271-579 | 262 | His-48 to His-53, | L0764: 5, L0771: 5, L0374: | | |
| | | | | | | Pro-65 to Gly-71, | 3, S0434: 3, H0506: 3, | | |
| | | | | | | Pro-91 to Arg-103. | S0356: 1, S0410: 1, H0264: | | |
| | | | | | | | 1, L0372: 1, L0783: 1, | | |
| | | | | | | | L0532: 1 and L0663: 1. | | |
| | HNSES94 | 1306633 | 187 | 152-1261 | 380 | Gln-10 to Thr-18, | | | |
| | | | | | | Asn-132 to Tyr-137. | | | |
| 60 | HHIMU43 | 1335781 | 70 | 30-332 | 263 | | S0422: 2, L0646: 2 and | | |
| | | | | | | | H0156: 1. | | |
| | HHIMU43 | 1305889 | 188 | 12-314 | 381 | Val-24 to Asp-40, | S0422: 2, L0646: 2 and | | |
| | | | | | | Asn-62 to Leu-73, | H0156: 1. | | |
| | | | | | | Tyr-87 to Ser-93. | | | |
| | HHIMU43 | 1306229 | 189 | 439-615 | 382 | | | | |
| 61 | HHMNV67 | 1335553 | 71 | 233-685 | 264 | | S0410: 1 | | |
| | HHMNV67 | 1306594 | 190 | 70-525 | 383 | Trp-35 to Trp-45, | S0410: 26, S0444: 6, S0358: | | |
| | | | | | | Pro-52 to Asp-57, | 4, S0440: 4, L0748: 4, | | |
| | | | | | | Thr-73 to Arg-82, | H0661: 3, S0442: 3, S0408: | | |
| | | | | | | Pro-105 to Leu-112, | 3, H0393: 3, H0574: 3, | | |
| | | | | | | Pro-115 to Arg-127, | S0438: 3, S0406: 3, S0360: 2, | | |
| | | | | | | Pro-140 to Ile-147. | H0510: 2, H0509: 2, L0764: | | |
| | | | | | | | 2, S0374: 2, H0742: 1, | | |
| | | | | | | | H0730: 1, H0722: 1, H0331: | | |
| | | | | | | | 1, H0204: 1, H0150: 1, | | |
| | | | | | | | H0615: 1, H0059: 1, L0772: | | |
| | | | | | | | 1, L0648: 1, L0803: 1, | | |
| | | | | | | | L0774: 1 and L0791: 1. | | |
| | HHMNV67 | 1309728 | 191 | 233-688 | 384 | Trp-35 to Trp-45, | | | |
| | | | | | | Pro-52 to Asp-57, | | | |
| | | | | | | Thr-73 to Arg-82, | | | |
| | | | | | | Pro-105 to Leu-112, | | | |
| | | | | | | Pro-115 to Arg-127, | | | |
| | | | | | | Pro-140 to Gln-151 | | | |
| 62 | HMTSU69 | 1335548 | 72 | 112-540 | 265 | | H0742: 1 | | |
| | HMTSU69 | 1306694 | 192 | 17-445 | 385 | Trp-35 to Trp-45, | H0742: 1 | | |
| | | | | | | Pro-52 to Asp-57, | | | |
| | | | | | | Thr-73 to Thr-80, | | | |
| | | | | | | Pro-96 to Leu-103, | | | |
| | | | | | | Pro-106 to Arg-118, | | | |
| | | | | | | Pro-131 to Gln-142. | | | |
| | HMTSU69 | 1307250 | 193 | 6-434 | 386 | Trp-35 to Trp-45, | | | |
| | | | | | | Pro-52 to Asp-57, | | | |
| | | | | | | Thr-73 to Thr-80, | | | |
| | | | | | | Pro-96 to Leu-103, | | | |
| | | | | | | Pro-106 to Arg-118, | | | |
| | | | | | | Pro-131 to Gln-142. | | | |
| 63 | HMWCU24 | 1318364 | 73 | 148-1500 | 266 | | H0617: 6, L0771: 5, L0740: | | |
| | | | | | | | 4, L0747: 3, H0265: 2, | | |
| | | | | | | | S0358: 2, S0476: 2, H0620: | | |
| | | | | | | | 2, H0040: 2, L0659: 2, | | |
| | | | | | | | L0809: 2, H0547: 2, L0748: | | |
| | | | | | | | 2, L0751: 2, L0754: 2, | | |
| | | | | | | | L0589: 2, H0295: 1, T0049: | | |
| | | | | | | | 1, H0657: 1, H0341: 1, | | |
| | | | | | | | H0661: 1, S0442: 1, S0360: | | |
| | | | | | | | 1, S0045: 1, S0132: 1, T0103: | | |
| | | | | | | | 1, S0050: 1, H0594: 1, | | |
| | | | | | | | H0266: 1, H0290: 1, L0455: | | |
| | | | | | | | 1, H0038: 1, H0280: 1, | | |
| | | | | | | | H0641: 1, S0002: 1, L0763: | | |
| | | | | | | | 1, L0371: 1, L0764: 1, | | |
| | | | | | | | L0766: 1, L0774: 1, L0805: | | |
| | | | | | | | 1, L0542: 1, L0783: 1, | | |
| | | | | | | | L0665: 1, H0520: 1, S0126: | | |
| | | | | | | | 1, H0684: 1, H0435: 1, | | |
| | | | | | | | S0380: 1, H0521: 1, H0436: | | |
| | | | | | | | 1, S0028: 1, L0742: 1, | | |
| | | | | | | | H0445: 1, L0590: 1, S0192: | | |
| | | | | | | | 1, H0542: 1, H0543: 1 and | | |
| | | | | | | | H0423: 1. | | |
| | HMWCU24 | 1308840 | 194 | 140-541 | 387 | Arg-23 to Ser-34. | H0617: 6, L0771: 5, L0740: | | |
| | | | | | | | 4, L0747: 3, H0265: 2, | | |
| | | | | | | | S0358: 2, S0476: 2, H0620: | | |
| | | | | | | | 2, H0040: 2, L0659: 2, | | |
| | | | | | | | L0809: 2, H0547: 2, L0748: | | |
| | | | | | | | 2, L0751: 2, L0754: 2, | | |
| | | | | | | | L0589: 2, H0295: 1, T0049: | | |
| | | | | | | | 1, H0657: 1, H0341: 1, | | |
| | | | | | | | H0661: 1, S0442: 1, S0360: | | |
| | | | | | | | 1, S0045: 1, S0132: 1, T0103: | | |
| | | | | | | | 1, S0050: 1, H0594: 1, | | |
| | | | | | | | H0266: 1, H0290: 1, L0455: | | |
| | | | | | | | 1, H0038: 1, H0280: 1, | | |
| | | | | | | | H0641: 1, S0002: 1, L0763: | | |
| | | | | | | | 1, L0371: 1, L0764: 1, | | |
| | | | | | | | L0766: 1, L0774: 1, L0805: | | |
| | | | | | | | 1, L0542: 1, L0783: 1, | | |
| | | | | | | | L0665: 1, H0520: 1, S0126: | | |
| | | | | | | | 1, H0684: 1, H0435: 1, | | |
| | | | | | | | S0380: 1, H0521: 1, H0436: | | |
| | | | | | | | 1, S0028: 1, L0742: 1, | | |
| | | | | | | | H0445: 1, L0590: 1, S0192: | | |
| | | | | | | | 1, H0542: 1, H0543: 1 and | | |
| | | | | | | | H0423: 1. | | |
| | HMWCU24 | 1308844 | 195 | 176-1528 | 388 | Arg-23 to Ser-34, | | | |
| | | | | | | Asn-221 to Phe-232, | | | |
| | | | | | | Thr-303 to His-308, | | | |
| | | | | | | Ser-334 to Pro-340, | | | |
| | | | | | | Asp-398 to | | | |
| | | | | | | Asn-407, | | | |
| | | | | | | Pro-439 to Ala-447. | | | |
| | HMWCU24 | 1308839 | 196 | 1-375 | 389 | Ser-9 to Pro-15, | | | |
| | | | | | | Asp-73 to Asn-82, | | | |
| | | | | | | Pro-114 to Ala-122. | | | |
| 64 | HCPC191 | 1323889 | 74 | 401-1201 | 267 | Thr-187 to Lys-192, | | | |
| | | | | | | Asn-255 to | | | |
| | | | | | | Leu-262. | | | |
| 65 | HDMSA08 | 1322805 | 75 | 591-1028 | 268 | His-46 to Gly-52, | H0424: 5, L0748: 4, L0439: | | |
| | | | | | | Arg-88 to Gln-100. | 4, H0733: 3, H0734: 3, | | |
| | | | | | | | L0794: 3, L0803: 3, L0777: | | |
| | | | | | | | 3, H0556: 2, H0645: 2, | | |
| | | | | | | | H0550: 2, H0597: 2, H0545: | | |
| | | | | | | | 2, H0687: 2, L0769: 2, | | |
| | | | | | | | L0809: 2, L0789: 2, L0666: | | |
| | | | | | | | 2, L0438: 2, H0521: 2, | | |
| | | | | | | | L0744: 2, L0740: 2, L0758: | | |
| | | | | | | | 2, S0031: 2, H0265: 1, | | |
| | | | | | | | H0685: 1, S0218: 1, H0657: | | |
| | | | | | | | 1, H0656: 1, H0728: 1, | | |
| | | | | | | | S0132: 1, S0476: 1, L0021: 1, | | |
| | | | | | | | S0010: 1, H0007: 1, H0052: | | |
| | | | | | | | 1, H0150: 1, H0050: 1, | | |
| | | | | | | | H0014: 1, H0416: 1, H0188: | | |
| | | | | | | | 1, H0213: 1, H0405: 1, | | |
| | | | | | | | H0418: 1, H0674: 1, S0366: | | |
| | | | | | | | 1, T0067: 1, H0413: 1, | | |
| | | | | | | | S0142: 1, L0369: 1, L0796: | | |
| | | | | | | | 1, L0388: 1, L0774: 1, | | |
| | | | | | | | L0776: 1, L0783: 1, L5623: | | |
| | | | | | | | 1, L0790: 1, H0519: 1, | | |
| | | | | | | | H0539: 1, S0013: 1, H0704: | | |
| | | | | | | | 1, H0478: 1, S0027: 1, | | |
| | | | | | | | L0743: 1, L0749: 1, L0780: | | |
| | | | | | | | 1, L0731: 1, L0588: 1 and | | |
| | | | | | | | H0352: 1. | | |
| 66 | HCPBA16 | 1319147 | 76 | 134-922 | 269 | Gln-55 to Asp-60, | L0744: 7, H0575: 4, H0081: | | |
| | | | | | | Arg-102 to Lys-108, | 4, S0028: 3, H0717: 2, | | |
| | | | | | | Asp-142 to Thr-147, | H0013: 2, H0309: 2, L0521: | | |
| | | | | | | Tyr-187 to Asp-201, | 2, L0662: 2, L0375: 2, | | |
| | | | | | | Lys-254 to Ala-263. | L5622: 2, H0144: 2, S0374: | | |
| | | | | | | | 2, H0689: 2, S0378: 2, | | |
| | | | | | | | L0743: 2, L0777: 2, L0731: | | |
| | | | | | | | 2, H0716: 1, L0459: 1, | | |
| | | | | | | | H0255: 1, S0442: 1, H0645: | | |
| | | | | | | | 1, H0411: 1, H0549: 1, | | |
| | | | | | | | H0592: 1, H0486: 1, H0427: | | |
| | | | | | | | 1, H0253: 1, H0085: 1, | | |
| | | | | | | | H0050: 1, H0082: 1, H0188: | | |
| | | | | | | | 1, H0428: 1, H0553: 1, | | |
| | | | | | | | H0038: 1, L0768: 1, L0659: | | |
| | | | | | | | 1, L0647: 1, L0789: 1, | | |
| | | | | | | | L0790: 1, L0666: 1, S0330: | | |
| | | | | | | | 1, H0754: 1, L0740: 1, | | |
| | | | | | | | L0750: 1, S0434: 1 and | | |
| | | | | | | | H0506: 1. | | |
| 67 | HCPBM77 | 1324637 | 77 | 52-2901 | 270 | Gly-31 to Arg-36, | | | |
| | | | | | | Thr-55 to Glu-62, | | | |
| | | | | | | Ser-64 to Ser-79, | | | |
| | | | | | | Arg-87 to Asp-96, | | | |
| | | | | | | Arg-103 to Ala-109, | | | |
| | | | | | | Asp-120 to | | | |
| | | | | | | Arg-126. | | | |
| 68 | HCPBR37 | 1319172 | 78 | 144-527 | 271 | Gln-76 to Glu-85, | L0758: 2 and H0754: 1. | | |
| | | | | | | Pro-103 to Gln-113. | | | |
| | HCPBR37 | 1319221 | 197 | 2-226 | 390 | Val-2 to Val-7, | | | |
| | | | | | | Pro-10 to Thr-16, | | | |
| | | | | | | Asn-18 to Gly-27, | | | |
| | | | | | | Glu-35 to Glu-44. | | | |
| 69 | HIEAG70 | 1319141 | 79 | 29-313 | 272 | | H0757: 1 | | |
| 70 | HDMTL77 | 1319253 | 80 | 316-1254 | 273 | Asp-43 to Gly-49, | H0734: 4, L0471: 3, H0624: | 17q21.1 | 109270, 109270, |
| | | | | | | Asp-109 to Gln-116, | 2, H0728: 1, H0735: 1, | | 109270, 109270, |
| | | | | | | Ser-128 to Arg-135, | H0733: 1, L0622: 1, H0599: | | 109270, 109270, |
| | | | | | | Glu-196 to Val-201, | 1, H0196: 1, L0662: 1, | | 109270, 148065, |
| | | | | | | Lys-281 to Ala-289. | L0747: 1, L0759: 1 and | | 148080, 148080, |
| | | | | | | | L0604: 1. | | 148080, 154275, |
| | | | | | | | | | 157140, 157140, |
| | | | | | | | | | 157140, 157140, |
| | | | | | | | | | 157140, 157140, |
| | | | | | | | | | 168860, 171190, |
| | | | | | | | | | 221820, 600119, |
| | | | | | | | | | 600119, 600119, |
| | | | | | | | | | 601550, 601551, |
| | | | | | | | | | 601844 |
| 71 | HDMTP20 | 1322795 | 81 | 338-1051 | 274 | Ala-49 to Pro-57, | H0056: 7, L0748: 6, L0754: | | |
| | | | | | | Arg-77 to Val-83, | 6, L0731: 6, L0769: 5, | | |
| | | | | | | Tyr-91 to Ala-98, | L0776: 4, S0436: 4, L0596: | | |
| | | | | | | Arg-121 to Gly-126, | 4, T0049: 3, S0344: 3, | | |
| | | | | | | Glu-204 to Asp-212, | L0805: 3, L0659: 3, S0126: | | |
| | | | | | | Glu-230 to Thr-237. | 3, S0328: 3, S0442: 2, | | |
| | | | | | | | H0734: 2, S0045: 2, H0544: | | |
| | | | | | | | 2, H0620: 2, H0031: 2, | | |
| | | | | | | | H0553: 2, H0551: 2, H0494: | | |
| | | | | | | | 2, L0768: 2, L0794: 2, | | |
| | | | | | | | H0521: 2, L0743: 2, L0439: | | |
| | | | | | | | 2, L0750: 2, L0756: 2, | | |
| | | | | | | | S0031: 2, S0192: 2, L0615: 1, | | |
| | | | | | | | S0040: 1, H0341: 1, S0212: | | |
| | | | | | | | 1, S0001: 1, H0484: 1, | | |
| | | | | | | | H0661: 1, S0360: 1, S0132: | | |
| | | | | | | | 1, H0619: 1, H0393: 1, | | |
| | | | | | | | L2255: 1, S0278: 1, L3817: | | |
| | | | | | | | 1, H0643: 1, T0039: 1, | | |
| | | | | | | | T0109: 1, H0013: 1, H0244: | | |
| | | | | | | | 1, L0021: 1, H0097: 1, | | |
| | | | | | | | H0599: 1, S0010: 1, H0318: | | |
| | | | | | | | 1, H0050: 1, L0471: 1, | | |
| | | | | | | | H0024: 1, S0050: 1, H0375: | | |
| | | | | | | | 1, S0003: 1, L0483: 1, | | |
| | | | | | | | H0644: 1, H0628: 1, H0032: | | |
| | | | | | | | 1, L0455: 1, H0124: 1, | | |
| | | | | | | | H0316: 1, H0163: 1, H0090: | | |
| | | | | | | | 1, H0560: 1, H0647: 1, | | |
| | | | | | | | H0646: 1, S0142: 1, L0770: | | |
| | | | | | | | 1, L0773: 1, L0648: 1, | | |
| | | | | | | | L0662: 1, L0766: 1, L0649: | | |
| | | | | | | | 1, L0803: 1, L0775: 1, | | |
| | | | | | | | L0806: 1, L0653: 1, L5623: | | |
| | | | | | | | 1, L0787: 1, L0665: 1, | | |
| | | | | | | | H0539: 1, S0152: 1, H0479: | | |
| | | | | | | | 1, S0037: 1, S3014: 1, S0027: | | |
| | | | | | | | 1, S0206: 1, L0779: 1, | | |
| | | | | | | | L0752: 1, L0755: 1, L0757: | | |
| | | | | | | | 1, L0758: 1, L0759: 1, | | |
| | | | | | | | H0595: 1, S0434: 1, S0011: | | |
| | | | | | | | 1, S0194: 1, H0423: 1 and | | |
| | | | | | | | H0506: 1. | | |
| | HDMTP20 | 1322798 | 198 | 30-992 | 391 | Glu-47 to Asp-55, | | | |
| | | | | | | His-200 to His-206, | | | |
| | | | | | | Asp-261 to | | | |
| | | | | | | Arg-267, | | | |
| | | | | | | Asp-308 to | | | |
| | | | | | | Arg-315. | | | |
| 72 | HIEAP38 | 1319194 | 82 | 278-592 | 275 | | L0742: 18, L0744: 15, | | |
| | | | | | | | L0751: 8, L0743: 6, L0766: | | |
| | | | | | | | 5, L0745: 5, L0750: 5, | | |
| | | | | | | | H0585: 4, H0052: 4, L0770: | | |
| | | | | | | | 4, L0806: 4, L0731: 4, | | |
| | | | | | | | S0358: 3, H0580: 3, S0007: | | |
| | | | | | | | 3, H0581: 3, H0194: 3, | | |
| | | | | | | | H0620: 3, T0010: 3, L0769: | | |
| | | | | | | | 3, L3905: 3, L0761: 3, | | |
| | | | | | | | H0521: 3, L0747: 3, L0749: | | |
| | | | | | | | 3, H0141: 2, S0040: 2, | | |
| | | | | | | | L0717: 2, H0550: 2, H0036: | | |
| | | | | | | | 2, H0024: 2, S0438: 2, | | |
| | | | | | | | H0132: 2, L0772: 2, L0764: | | |
| | | | | | | | 2, L0775: 2, L0783: 2, | | |
| | | | | | | | L0790: 2, L0666: 2, L0665: | | |
| | | | | | | | 2, L3827: 2, L0439: 2, | | |
| | | | | | | | L0777: 2, L0752: 2, L0757: | | |
| | | | | | | | 2, H0484: 1, H0662: 1, | | |
| | | | | | | | H0125: 1, L0617: 1, S0360: | | |
| | | | | | | | 1, H0730: 1, H0747: 1, | | |
| | | | | | | | H0749: 1, H0261: 1, H0549: | | |
| | | | | | | | 1, S0222: 1, H0438: 1, | | |
| | | | | | | | H0587: 1, H0497: 1, H0333: | | |
| | | | | | | | 1, H0599: 1, H0042: 1, | | |
| | | | | | | | H0590: 1, H0618: 1, H0253: | | |
| | | | | | | | 1, H0327: 1, H0123: 1, | | |
| | | | | | | | H0050: 1, H0012: 1, H0201: | | |
| | | | | | | | 1, H0083: 1, H0179: 1, | | |
| | | | | | | | H0687: 1, H0288: 1, H0622: | | |
| | | | | | | | 1, H0031: 1, H0628: 1, | | |
| | | | | | | | S0036: 1, H0135: 1, H0087: | | |
| | | | | | | | 1, H0551: 1, H0488: 1, | | |
| | | | | | | | S0038: 1, L0351: 1, H0494: | | |
| | | | | | | | 1, H0652: 1, L3818: 1, | | |
| | | | | | | | H0538: 1, L0640: 1, L0763: | | |
| | | | | | | | 1, L4747: 1, L0796: 1, | | |
| | | | | | | | L5566: 1, L0641: 1, L0643: | | |
| | | | | | | | 1, L0648: 1, L0768: 1, | | |
| | | | | | | | L0794: 1, L0803: 1, L0651: | | |
| | | | | | | | 1, L0807: 1, L5622: 1, | | |
| | | | | | | | L0787: 1, L0788: 1, S0428: | | |
| | | | | | | | 1, H0757: 1, H0547: 1, | | |
| | | | | | | | H0659: 1, H0658: 1, H0672: | | |
| | | | | | | | 1, S0330: 1, S0152: 1, | | |
| | | | | | | | H0522: 1, H0696: 1, S0406: | | |
| | | | | | | | 1, S0037: 1, L0754: 1, | | |
| | | | | | | | L0746: 1, L0779: 1, L0780: | | |
| | | | | | | | 1, L0758: 1, L0759: 1, | | |
| | | | | | | | H0445: 1, S0436: 1, L0596: | | |
| | | | | | | | 1, L0595: 1, H0423: 1, | | |
| | | | | | | | S0424: 1 and H0352: 1. | | |
| | HIEAP38 | 1319262 | 199 | 509-1855 | 392 | Ser-33 to Ala-40, | | | |
| | | | | | | Gln-42 to Asn-48, | | | |
| | | | | | | Glu-67 to Leu-83, | | | |
| | | | | | | Gly-93 to Leu-98, | | | |
| | | | | | | Glu-154 to Ser-160, | | | |
| | | | | | | Glu-211 to Cys-226, | | | |
| | | | | | | Arg-271 to Ile-278, | | | |
| | | | | | | Asp-299 to Phe-305, | | | |
| | | | | | | Ser-315 to Gly-321, | | | |
| | | | | | | His-324 to Tyr-332, | | | |
| | | | | | | Tyr-337 to Tyr-350. | | | |
| 73 | HIEBT86 | 1322715 | 83 | 296-544 | 276 | | H0757: 1 | | |
| 74 | HIGAN47 | 1319301 | 84 | 33-578 | 277 | | H0764: 1 | 4p16.3 | 102680, 134934, |
| | | | | | | | | | 134934, 134934, |
| | | | | | | | | | 134934, 134934, |
| | | | | | | | | | 134934, 134934, |
| | | | | | | | | | 134934, 143100, |
| | | | | | | | | | 180072, 180072, |
| | | | | | | | | | 194190, 252800, |
| | | | | | | | | | 252800, 252800, |
| | | | | | | | | | 602104, 605841 |
| 75 | HDMSW74 | 1319286 | 85 | 244-516 | 278 | Ala-3 to Lys-9, | H0271: 32, S0052: 7, | | |
| | | | | | | Gln-65 to Asp-75, | H0713: 6, S0360: 6, L0623: | | |
| | | | | | | Leu-83 to Ala-89. | 6, H0416: 6, L2260: 6, | | |
| | | | | | | | H0716: 5, H0510: 5, H0717: | | |
| | | | | | | | 4, H0734: 4, H0427: 4, | | |
| | | | | | | | S0132: 3, H0250: 3, H0069: | | |
| | | | | | | | 3, S0474: 3, H0581: 3, | | |
| | | | | | | | H0179: 3, H0518: 3, S0027: | | |
| | | | | | | | 3, H0624: 2, S0476: 2, | | |
| | | | | | | | H0632: 2, H0309: 2, H0038: | | |
| | | | | | | | 2, H0646: 2, L0643: 2, | | |
| | | | | | | | L0649: 2, S0428: 2, S0053: 2, | | |
| | | | | | | | S3014: 2, L0601: 2, H0668: | | |
| | | | | | | | 2, S0242: 2, S0196: 2, | | |
| | | | | | | | H0171: 1, L3643: 1, L3644: | | |
| | | | | | | | 1, H0657: 1, S0116: 1, | | |
| | | | | | | | S0001: 1, S0408: 1, H0742: | | |
| | | | | | | | 1, H0770: 1, L3388: 1, | | |
| | | | | | | | S0278: 1, H0549: 1, H0550: | | |
| | | | | | | | 1, S0222: 1, H0431: 1, | | |
| | | | | | | | H0592: 1, H0331: 1, L3653: | | |
| | | | | | | | 1, T0060: 1, S0280: 1, | | |
| | | | | | | | H0081: 1, H0024: 1, H0355: | | |
| | | | | | | | 1, H0375: 1, H0719: 1, | | |
| | | | | | | | H0687: 1, H0428: 1, H0039: | | |
| | | | | | | | 1, H0604: 1, H0644: 1, | | |
| | | | | | | | H0383: 1, H0063: 1, H0494: | | |
| | | | | | | | 1, H0649: 1, S0426: 1, | | |
| | | | | | | | L0763: 1, L0667: 1, L0774: | | |
| | | | | | | | 1, L0629: 1, H0659: 1, | | |
| | | | | | | | H0672: 1, H0727: 1, S3012: | | |
| | | | | | | | 1, S0436: 1, L0604: 1, | | |
| | | | | | | | L0361: 1, H0653: 1 and | | |
| | | | | | | | H0775: 1. | | |
| 76 | HIGBG18 | 1324325 | 86 | 71-724 | 279 | | S0378: 3, S0380: 3, H0764: | | |
| | | | | | | | 2, H0766: 2 and L4558: 1. | | |
| 77 | HDMTE62 | 1319302 | 87 | 90-359 | 280 | Leu-63 to Arg-68. | L0748: 8, S0126: 7, L0471: | | |
| | | | | | | | 6, H0619: 4, H0486: 4, | | |
| | | | | | | | S0192: 4, H0717: 3, S0116: | | |
| | | | | | | | 3, S0358: 3, H0369: 3, | | |
| | | | | | | | H0123: 3, H0012: 3, H0713: | | |
| | | | | | | | 2, H0645: 2, H0574: 2, | | |
| | | | | | | | H0590: 2, H0328: 2, L0794: | | |
| | | | | | | | 2, L5622: 2, L0747: 2, | | |
| | | | | | | | L0759: 2, H0624: 1, H0170: | | |
| | | | | | | | 1, H0716: 1, H0583: 1, | | |
| | | | | | | | S0442: 1, S0360: 1, S0408: 1, | | |
| | | | | | | | H0733: 1, H0734: 1, H0411: | | |
| | | | | | | | 1, H0549: 1, L3655: 1, | | |
| | | | | | | | H0244: 1, H0427: 1, H0575: | | |
| | | | | | | | 1, T0071: 1, H0309: 1, | | |
| | | | | | | | H0544: 1, H0024: 1, H0032: | | |
| | | | | | | | 1, H0038: 1, H0616: 1, | | |
| | | | | | | | H0488: 1, T0004: 1, H0561: | | |
| | | | | | | | 1, S0352: 1, L0776: 1, S0052: | | |
| | | | | | | | 1, H0725: 1, H0723: 1, | | |
| | | | | | | | H0519: 1, H0689: 1, H0651: | | |
| | | | | | | | 1, S0330: 1, H0752: 1, | | |
| | | | | | | | S0432: 1, L0439: 1, L0749: | | |
| | | | | | | | 1, L0756: 1, L0731: 1, | | |
| | | | | | | | S0436: 1, S0194: 1, S0196: 1, | | |
| | | | | | | | S0458: 1 and S0384: 1. | | |
| | HDMTE62 | 1319303 | 200 | 187-372 | 393 | Ser-1 to Gln-14. | | | |
| 78 | HCPRA19 | 1324733 | 88 | 52-750 | 281 | Val-125 to Pro-131, | L2570: 23, L3388: 12, | 13q32.3 | 601837, 601837, |
| | | | | | | Gln-133 to Thr-141, | S0440: 12, L0666: 8, S0422: | | 606258 |
| | | | | | | Asp-208 to Phe-216. | 7, L0665: 7, L2513: 6, | | |
| | | | | | | | L0662: 6, H0521: 6, L0439: | | |
| | | | | | | | 6, L0754: 6, L0756: 6, | | |
| | | | | | | | H0551: 5, L3832: 5, H0657: | | |
| | | | | | | | 4, S0358: 4, S0360: 4, | | |
| | | | | | | | H0013: 4, L0766: 4, L2884: | | |
| | | | | | | | 3, H0580: 3, H0771: 3, | | |
| | | | | | | | L3817: 3, H0791: 3, H0581: | | |
| | | | | | | | 3, H0150: 3, H0674: 3, | | |
| | | | | | | | L0805: 3, L0776: 3, L0664: | | |
| | | | | | | | 3, H0539: 3, S0406: 3, | | |
| | | | | | | | H0782: 2, H0583: 2, L2995: | | |
| | | | | | | | 2, L2282: 2, S0418: 2, S0420: | | |
| | | | | | | | 2, S0442: 2, S0408: 2, S0007: | | |
| | | | | | | | 2, H0747: 2, L2788: 2, | | |
| | | | | | | | L2789: 2, H0351: 2, H0441: | | |
| | | | | | | | 2, L3816: 2, H0486: 2, | | |
| | | | | | | | H0156: 2, H0098: 2, H0590: | | |
| | | | | | | | 2, H0004: 2, L0471: 2, | | |
| | | | | | | | H0328: 2, H0030: 2, H0494: | | |
| | | | | | | | 2, L3181: 2, L5152: 2, | | |
| | | | | | | | L0646: 2, L0771: 2, L0649: | | |
| | | | | | | | 2, L0774: 2, L0657: 2, | | |
| | | | | | | | L6427: 2, L5623: 2, L2260: | | |
| | | | | | | | 2, L0565: 2, L3827: 2, | | |
| | | | | | | | H0547: 2, H0648: 2, S0330: | | |
| | | | | | | | 2, S0380: 2, S0152: 2, | | |
| | | | | | | | H0522: 2, H0555: 2, H0478: | | |
| | | | | | | | 2, L0750: 2, L0777: 2, | | |
| | | | | | | | H0445: 2, S0436: 2, L0362: | | |
| | | | | | | | 2, S0192: 2, H0543: 2, | | |
| | | | | | | | L3839: 2, H0624: 1, H0170: | | |
| | | | | | | | 1, H0556: 1, L3643: 1, | | |
| | | | | | | | S0342: 1, H0294: 1, H0656: | | |
| | | | | | | | 1, S0116: 1, H0341: 1, | | |
| | | | | | | | S0212: 1, H0662: 1, H0761: | | |
| | | | | | | | 1, H0450: 1, H0638: 1, | | |
| | | | | | | | S0356: 1, S0444: 1, L3705: 1, | | |
| | | | | | | | H0742: 1, H0722: 1, H0735: | | |
| | | | | | | | 1, H0794: 1, H0749: 1, | | |
| | | | | | | | H0770: 1, H0778: 1, H0777: | | |
| | | | | | | | 1, H0772: 1, H0645: 1, | | |
| | | | | | | | H0619: 1, L2819: 1, L3485: | | |
| | | | | | | | 1, L5438: 1, H0406: 1, | | |
| | | | | | | | H0549: 1, H0431: 1, H0370: | | |
| | | | | | | | 1, H0415: 1, H0600: 1, | | |
| | | | | | | | H0586: 1, H0331: 1, H0574: | | |
| | | | | | | | 1, L1789: 1, T0060: 1, | | |
| | | | | | | | H0069: 1, H0427: 1, H0599: | | |
| | | | | | | | 1, H0147: 1, S0010: 1, | | |
| | | | | | | | H0421: 1, H0052: 1, H0263: | | |
| | | | | | | | 1, H0596: 1, L0040: 1, | | |
| | | | | | | | H0597: 1, H0569: 1, H0123: | | |
| | | | | | | | 1, H0012: 1, H0023: 1, | | |
| | | | | | | | H0510: 1, H0375: 1, S0003: | | |
| | | | | | | | 1, S0022: 1, S0214: 1, | | |
| | | | | | | | H0615: 1, H0039: 1, H0622: | | |
| | | | | | | | 1, T0006: 1, H0617: 1, | | |
| | | | | | | | H0673: 1, H0090: 1, H0487: | | |
| | | | | | | | 1, H0413: 1, H0059: 1, | | |
| | | | | | | | T0042: 1, H0334: 1, S0464: | | |
| | | | | | | | 1, H0745: 1, H0509: 1, | | |
| | | | | | | | H0641: 1, H0767: 1, H0647: | | |
| | | | | | | | 1, H0649: 1, S0002: 1, | | |
| | | | | | | | L3162: 1, H0743: 1, L0769: | | |
| | | | | | | | 1, L0638: 1, L0637: 1, | | |
| | | | | | | | L6415: 1, L0364: 1, L0650: | | |
| | | | | | | | 1, L0651: 1, L0806: 1, | | |
| | | | | | | | L0654: 1, L0655: 1, L0527: | | |
| | | | | | | | 1, L0659: 1, L0384: 1, | | |
| | | | | | | | L0809: 1, L0789: 1, L0663: | | |
| | | | | | | | 1, L3391: 1, L3634: 1, | | |
| | | | | | | | L2653: 1, L3635: 1, L2264: | | |
| | | | | | | | 1, L3819: 1, L3639: 1, | | |
| | | | | | | | L5244: 1, H0144: 1, H0780: | | |
| | | | | | | | 1, H0779: 1, L3811: 1, | | |
| | | | | | | | L3828: 1, L3829: 1, H0520: | | |
| | | | | | | | 1, H0519: 1, H0690: 1, | | |
| | | | | | | | H0659: 1, H0660: 1, S0378: | | |
| | | | | | | | 1, H0754: 1, H0753: 1, | | |
| | | | | | | | S0454: 1, H0696: 1, H0134: | | |
| | | | | | | | 1, S0404: 1, H0784: 1, | | |
| | | | | | | | H0785: 1, S0028: 1, L0748: | | |
| | | | | | | | 1, L0747: 1, L0749: 1, | | |
| | | | | | | | L0731: 1, L0758: 1, S0031: | | |
| | | | | | | | 1, L2200: 1, H0595: 1, | | |
| | | | | | | | H0707: 1, S0434: 1, L0596: | | |
| | | | | | | | 1, H0668: 1, H0667: 1, | | |
| | | | | | | | S0242: 1, H0423: 1, H0801: | | |
| | | | | | | | 1, S0424: 1, L3352: 1, | | |
| | | | | | | | L2853: 1, L3804: 1 and | | |
| | | | | | | | H0712: 1. | | |
| | HCPRA19 | 1324734 | 201 | 132-257 | 394 | | | | |
| 79 | HCPCB26 | 1319182 | 89 | 279-731 | 282 | Asn-54 to Phe-66. | H0754: 1 | 14q11.2 | 162080, 182600, |
| | | | | | | | | | 186880, 190195, |
| | | | | | | | | | 190195, 190195, |
| | | | | | | | | | 600243, 602279, |
| | | | | | | | | | 602279, 603593, |
| | | | | | | | | | 605463, 606439, |
| | | | | | | | | | 606675 |
| 80 | HCPCN28 | 1319035 | 90 | 103-720 | 283 | Ser-27 to Tyr-37, | H0754: 1 | | |
| | | | | | | Pro-82 to Thr-112, | | | |
| | | | | | | Lys-118 to Ile-129, | | | |
| | | | | | | Thr-152 to His-158. | | | |
| 81 | HABCP53 | 1322789 | 91 | 96-356 | 284 | Ser-57 to Gly-63, | H0250: 18, L0754: 8, | | |
| | | | | | | Leu-68 to Gln-86. | H0638: 6, L0775: 6, L0748: | | |
| | | | | | | | 5, L3649: 4, S0278: 4, S0144: | | |
| | | | | | | | 4; H0522: 4, H0663: 3, | | |
| | | | | | | | H0581: 3, S0142: 3, H0521: | | |
| | | | | | | | 3, H0445: 3, H0255: 2, | | |
| | | | | | | | H0069: 2, H0635: 2, S0003: | | |
| | | | | | | | 2, S0344: 2, H0695: 2, | | |
| | | | | | | | L0770: 2, S0428: 2, L2375: | | |
| | | | | | | | 2, L0749: 2, L0756: 2, | | |
| | | | | | | | L0779: 2, L0777: 2, L0759: | | |
| | | | | | | | 2, L0599: 2, L0603: 2, | | |
| | | | | | | | H0170: 1, H0222: 1, L3643: | | |
| | | | | | | | 1, S0218: 1, L3814: 1, | | |
| | | | | | | | H0402: 1, L3658: 1, S0358: | | |
| | | | | | | | 1, S0360: 1, H0580: 1, | | |
| | | | | | | | H0728: 1, L3064: 1, H0747: | | |
| | | | | | | | 1, S0132: 1, H0392: 1, | | |
| | | | | | | | S0474: 1, H0041: 1, H0572: | | |
| | | | | | | | 1, H0109: 1, H0076: 1, | | |
| | | | | | | | H0179: 1, H0271: 1, H0188: | | |
| | | | | | | | 1, L0055: 1, H0674: 1, | | |
| | | | | | | | S0382: 1, S0440: 1, H0649: | | |
| | | | | | | | 1, L0762: 1, L0763: 1, | | |
| | | | | | | | L0769: 1, L0662: 1, L0768: | | |
| | | | | | | | 1, L0774: 1, L0806: 1, | | |
| | | | | | | | L0776: 1, L0659: 1, L0664: | | |
| | | | | | | | 1, S0052: 1, S0053: 1, | | |
| | | | | | | | H0689: 1, H0684: 1, H0672: | | |
| | | | | | | | 1, H0753: 1, H0710: 1, | | |
| | | | | | | | H0518: 1, S0146: 1, H0727: | | |
| | | | | | | | 1, L0747: 1, L0755: 1 and | | |
| | | | | | | | H0775: 1. | | |
| 82 | HCPBO66 | 1324570 | 92 | 119-856 | 285 | Arg-25 to Gly-31, | H0754: 1 | 1p36.11 | 111620, 111700, |
| | | | | | | Pro-45 to Gly-52, | | | 111750, 120550, |
| | | | | | | Pro-71 to Gly-76, | | | 120570, 120575, |
| | | | | | | Pro-81 to Gly-91, | | | 130500, 600975 |
| | | | | | | Glu-107 to Phe-118, | | | |
| | | | | | | Thr-125 to Pro-134, | | | |
| | | | | | | Pro-147 to Gly-156, | | | |
| | | | | | | Gly-194 to Asn-203. | | | |
| | HCPBO66 | 1324569 | 202 | 142-720 | 395 | Gly-12 to Gln-17, | | | |
| | | | | | | Pro-29 to Phe-66, | | | |
| | | | | | | Thr-73 to Pro-82, | | | |
| | | | | | | Pro-95 to Gly-104, | | | |
| | | | | | | Gly-142 to Asn-151. | | | |
| 83 | HIGAT14 | 1321874 | 93 | 30-368 | 286 | Ala-38 to Ser-49, | | 6pter-p21.1 | |
| | | | | | | Asp-106 to Gln-112. | | | |
| 84 | HESYT64 | 1320561 | 94 | 417-737 | 287 | Arg-26 to Pro-32, | S0282: 1, S0358: 1, H0749: | | |
| | | | | | | Pro-54 to Gly-60, | 1, H0581: 1, H0767: 1 and | | |
| | | | | | | Gln-67 to Asp-74. | L2257: 1. | | |
| 85 | HALJC43 | 1320481 | 95 | 276-467 | 288 | Gln-42 to Ala-47. | L0805: 2, S0152: 2, L0717: | | |
| | | | | | | | 1, L0766: 1, L0776: 1, | | |
| | | | | | | | L0665: 1 and H0721: 1. | | |
| 86 | HESZO72 | 1319148 | 96 | 98-442 | 289 | His-39 to Ser-45, | H0749: 1 | | |
| | | | | | | Ser-81 to Arg-87, | | | |
| | | | | | | Leu-90 to Ser-100. | | | |
| 87 | HESZV10 | 1319160 | 97 | 115-486 | 290 | | H0749: 1 | | |
| 88 | HESYL64 | 1319153 | 98 | 80-634 | 291 | Pro-36 to Glu-41, | H0580: 1 and H0749: 1. | | |
| | | | | | | Arg-47 to Gly-56, | | | |
| | | | | | | Glu-63 to Tyr-71, | | | |
| | | | | | | Lys-83 to Tyr-98, | | | |
| | | | | | | Arg-110 to Gln-117, | | | |
| | | | | | | Gly-162 to Glu-179. | | | |
| | HESYL64 | 1319226 | 203 | 196-753 | 396 | | | | |
| 89 | HESYN37 | 1319167 | 99 | 232-477 | 292 | Pro-37 to Gly-49. | H0749: 1 | | |

Description of Table 1C

[0233] The polynucleotides or polypeptides, or agonists or antagonists of the present invention can be used in assays to test for one or more biological activities. If these polynucleotides and polypeptides do exhibit activity in a particular assay, it is likely that these molecules may be involved in the diseases associated with the biological activity. Thus, the polynucleotides or polypeptides, or agonists or antagonists could be used to treat the associated disease.

[0234] In preferred embodiments, the present invention encompasses a method of detecting, preventing, treating, and/or ameliorating a disease or disorder listed as listed in the “Preferred Indications” column of Table 1C (below); comprising administering to a patient (in which such detection, prevention, treatment, and/or amelioration is desired) a protein, nucleic acid, or antibody of the invention (or fragment or variant thereof) represented by Table 1A and Table 1B (in the same row as the disease or disorder to be treated is listed in the “Preferred Indications” column of Table 1C) in an amount effective to detect, prevent, treat, or ameliorate the disease or disorder.

[0235] As indicated in Table 1C, the polynucleotides, polypeptides, agonists, or antagonists of the present invention (including antibodies) can be used in assays to test for one or more biological activities. If these polynucleotides and polypeptides do exhibit activity in a particular assay, it is likely that these molecules may be involved in the diseases associated with the biological activity. Thus, the polynucleotides or polypeptides, or agonists or antagonists thereof (including antibodies) could be used to prevent, treat, or ameliorate the associated disease.

[0236] The present invention encompasses methods of detecting, preventing, diagnosing, prognosticating, treating, and/or ameliorating a disease or disorder. In preferred embodiments, the present invention encompasses a method of detecting, diagnosing, treating, preventing, or ameliorating a disease or disorder listed in the “Preferred Indications” column of Table 1C; comprising administering to a patient in which such treatment, prevention, or amelioration is desired a protein, nucleic acid, or antibody of the invention (or fragment or variant thereof) in an amount effective to treat, prevent, or ameliorate the disease or disorder. The first and second columns of Table 1C show the “Gene No.” and “cDNA Clone ID No.”, respectively, indicating certain nucleic acids and proteins (or antibodies against the same) of the invention (including polynucleotide, polypeptide, and antibody fragments or variants thereof) that may be used in detecting, preventing, diagnosing, prognosticating, treating, and/or ameliorating the disease(s) or disorder(s) indicated in the corresponding row in Table 1C.

[0237] In another embodiment, the present invention also encompasses methods of preventing, treating, diagnosing, or ameliorating a disease or disorder listed in the “Preferred Indications” column of Table 1C; comprising administering to a patient combinations of the proteins, nucleic acids, or antibodies of the invention (or fragments or variants thereof), sharing similar indications as shown in the corresponding rows in Table 1C.

[0238] The “Preferred Indication” column describes diseases, disorders, and/or conditions that may be treated, prevented, diagnosed, or ameliorated by a protein, nucleic acid, or antibody of the invention (or fragment or variant thereof).

[0239] The recitation of “Cancer” in the “Preferred Indication” column indicates that the corresponding nucleic acid and protein, or antibody against the same, of the invention (or fragment or variant thereof) may be used for example, to diagnose, treat, prevent, and/or ameliorate diseases and/or disorders relating to neoplastic diseases (e.g., leukemias, cancers, and/or as described below under “Hyperproliferative Disorders”).

[0240] In specific embodiments, a protein, nucleic acid, or antibody of the invention (or fragment or variant thereof) having a “Cancer” recitation in the “Preferred Indication” column of Table 1C may be used for example, to diagnose, treat, prevent, and/or ameliorate a neoplasm located in a tissue selected from the group consisting of: colon, abdomen, bone, breast, digestive system, liver, pancreas, prostate, peritoneum, lung, blood (e.g., leukemia), endocrine glands (adrenal, parathyroid, pituitary, testicles, ovary, thymus, thyroid), uterus, eye, head and neck, nervous (central and peripheral), lymphatic system, pelvic, skin, soft tissue, spleen, thoracic, and urogenital.

[0241] In specific embodiments, a protein, nucleic acid, or antibody of the invention (or fragment or variant thereof) having a “Cancer” recitation in the “Preferred Indication” column of Table 1C, may be used for example, to diagnose, treat, prevent, and/or ameliorate a pre-neoplastic condition, selected from the group consisting of: hyperplasia (e.g., endometrial hyperplasia and/or as described in the section entitled “Hyperproliferative Disorders”), metaplasia (e.g., connective tissue metaplasia, atypical metaplasia, and/or as described in the section entitled “Hyperproliferative Disorders”), and/or dysplasia (e.g., cervical dysplasia, and bronchopulmonary dysplasia).

[0242] In another specific embodiment, a protein, nucleic acid, or antibody of the invention (or fragment or variant thereof) having a “Cancer” recitation in the “Preferred Indication” column of Table 1C, may be used for example, to diagnose, treat, prevent, and/or ameliorate a benign dysproliferative disorder selected from the group consisting of: benign tumors, fibrocystic conditions, tissue hypertrophy, and/or as described in the section entitled “Hyperproliferative Disorders”.

[0243] The recitation of “Immune/Hematopoietic” in the “Preferred Indication” column indicates that the corresponding nucleic acid and protein, or antibody against the same, of the invention (or fragment or variant thereof), may be used for example, to diagnose, treat, prevent, and/or ameliorate diseases and/or disorders relating to neoplastic diseases (e.g., as described below under “Hyperproliferative Disorders”), blood disorders (e.g., as described below under “Immune Activity” “Cardiovascular Disorders” and/or “Blood-Related Disorders”), and infections (e.g., as described below under “Infectious Disease”).

[0244] In specific embodiments, a protein, nucleic acid, or antibody of the invention (or fragment or variant thereof) having the “Immune/Hematopoietic” recitation in the “Preferred Indication” column of Table 1C, may be used for example, to diagnose, treat, prevent, and/or ameliorate a disease or disorder selected from the group consisting of: anemia, pancytopenia, leukopenia, thrombocytopenia, leukemias, Hodgkin's disease, non-Hodgkin's lymphoma, acute lymphocytic anemia (ALL), plasmacytomas, multiple myeloma, Burkitt's lymphoma, arthritis, asthma, AIDS, autoimmune disease, rheumatoid arthritis, granulomatous disease, immune deficiency, inflammatory bowel disease, sepsis, neutropenia, neutrophilia, psoriasis, immune reactions to transplanted organs and tissues, systemic lupus erythematosis, hemophilia, hypercoagulation, diabetes mellitus, endocarditis, meningitis, Lyme Disease, and allergies.

[0245] The recitation of “Reproductive” in the “Preferred Indication” column indicates that the corresponding nucleic acid and protein, or antibody against the same, of the invention (or fragment or variant thereof), may be used for example, to diagnose, treat, prevent, and/or ameliorate diseases and/or disorders relating to neoplastic diseases (e.g., as described below under “Hyperproliferative Disorders”), and disorders of the reproductive system (e.g., as described below under “Reproductive System Disorders”).

[0246] In specific embodiments, a protein, nucleic acid, or antibody of the invention (or fragment or variant thereof) having a “Reproductive” recitation in the “Preferred Indication” column of Table 1C, may be used for example, to diagnose, treat, prevent, and/or ameliorate a disease or disorder selected from the group consisting of: cryptorchism, prostatitis, inguinal hernia, varicocele, leydig cell tumors, verrucous carcinoma, prostatitis, malacoplakia, Peyronie's disease, penile carcinoma, squamous cell hyperplasia, dysmenorrhea, ovarian adenocarcinoma, Turner's syndrome, mucopurulent cervicitis, Sertoli-leydig tumors, ovarian cancer, uterine cancer, pelvic inflammatory disease, testicular cancer, prostate cancer, Klinefelter's syndrome, Young's syndrome, premature ejaculation, diabetes mellitus, cystic fibrosis, Kartagener's syndrome, testicular atrophy, testicular feminization, anorchia, ectopic testis, epididymitis, orchitis, gonorrhea, syphilis, testicular torsion, vasitis nodosa, germ cell tumors, stromal tumors, dysmenorrhea, retroverted uterus, endometriosis, fibroids, adenomyosis, anovulatory bleeding, amenorrhea, Cushing's syndrome, hydatidiform moles, Asherman's syndrome, premature menopause, precocious puberty, uterine polyps, dysfunctional uterine bleeding, cervicitis, chronic cervicitis, mucopurulent cervicitis, cervical dysplasia, cervical polyps, Nabothian cysts, cervical erosion, cervical incompetence, cervical neoplasms, pseudohermaphroditism, and premenstrual syndrome.

[0247] The recitation of “Musculoskeletal” in the “Preferred Indication” column indicates that the corresponding nucleic acid and protein, or antibody against the same, of the invention (or fragment or variant thereof), may be used for example, to diagnose, treat, prevent, and/or ameliorate diseases and/or disorders relating to neoplastic diseases (e.g., as described below under “Hyperproliferative Disorders”), and disorders of the immune system (e.g., as described below under “Immune Activity”).

[0248] In specific embodiments, a protein, nucleic'acid, or antibody of the invention (or fragment or variant thereof) having a “Musculoskeletal” recitation in the “Preferred Indication” column of Table 1C, may be used for example, to diagnose, treat, prevent, and/or ameliorate a disease or disorder selected from the group consisting of: bone cancers (e.g., osteochondromas, benign chondromas, chondroblastoma, chondromyxoid fibromas, osteoid osteomas, giant cell tumors, multiple myeloma, osteosarcomas), Paget's Disease, rheumatoid arthritis, systemic lupus erythematosus, osteomyelitis, Lyme Disease, gout, bursitis, tendonitis, osteoporosis, osteoarthritis, muscular dystrophy, mitochondrial myopathy, cachexia, and multiple sclerosis.

[0249] The recitation of “Cardiovascular” in the “Preferred Indication” column indicates that the corresponding nucleic acid and protein, or antibody against the same, of the invention (or fragment or variant thereof), may be used for example, to diagnose, treat, prevent, and/or ameliorate diseases and/or disorders relating to neoplastic diseases (e.g., as described below under “Hyperproliferative Disorders”), and disorders of the cardiovascular system (e.g., as described below under “Cardiovascular Disorders”).

[0250] In specific embodiments, a protein, nucleic acid, or antibody of the invention (or fragment or variant thereof) having a “Cardiovascular” recitation in the “Preferred Indication” column of Table 1C, may be used for example, to diagnose, treat, prevent, and/or ameliorate a disease or disorder selected from the group consisting of: myxomas, fibromas, rhabdomyomas, cardiovascular abnormalities (e.g., congenital heart defects, cerebral arteriovenous malformations, septal defects), heart disease (e.g., heart failure, congestive heart disease, arrhythmia, tachycardia, fibrillation, pericardial Disease, endocarditis), cardiac arrest, heart valve disease (e.g., stenosis, regurgitation, prolapse), vascular disease (e.g., hypertension, coronary artery disease, angina, aneurysm, arteriosclerosis, peripheral vascular disease), hyponatremia, hypematremia, hypokalemia, and hyperkalemia.

[0251] The recitation of “Mixed Fetal” in the “Preferred Indication” column indicates that the corresponding nucleic acid and protein, or antibody against the same, of the invention (or fragment or variant thereof), may be used for example, to diagnose, treat, prevent, and/or ameliorate diseases and/or disorders relating to neoplastic diseases (e.g., as described below under “Hyperproliferative Disorders”).

[0252] In specific embodiments, a protein, nucleic acid, or antibody of the invention (or fragment or variant thereof) having a “Mixed Fetal” recitation in the “Preferred Indication” column of Table 1C, may be used for example, to diagnose, treat, prevent, and/or ameliorate a disease or disorder selected from the group consisting of: spina bifida, hydranencephaly, neurofibromatosis, fetal alcohol syndrome, diabetes mellitus, PKU, Down's syndrome, Patau syndrome, Edwards syndrome, Turner syndrome, Apert syndrome, Carpenter syndrome, Conradi syndrome, Crouzon syndrome, cutis laxa, Cornelia de Lange syndrome, Ellis-van Creveld syndrome, Holt-Oram syndrome, Kartagener syndrome, Meckel-Gruber syndrome, Noonan syndrome, Pallister-Hall syndrome, Rubinstein-Taybi syndrome, Scimitar syndrome, Smith-Lemli-Opitz syndrome, thromocytopenia-absent radius (TAR) syndrome, Treacher Collins syndrome, Williams syndrome, Hirschsprung's disease, Meckel's diverticulum, polycystic kidney disease, Turner's syndrome, and gonadal dysgenesis, Klippel-Feil syndrome, Ostogenesis imperfecta, muscular dystrophy, Tay-Sachs disease, Wilm's tumor, neuroblastoma, and retinoblastoma.

[0253] The recitation of “Excretory” in the “Preferred Indication” column indicates that the corresponding nucleic acid and protein, or antibody against the same, of the invention (or fragment or variant thereof), may be used for example, to diagnose, treat, prevent, and/or ameliorate diseases and/or disorders relating to neoplastic diseases (e.g., as described below under “Hyperproliferative Disorders”) and renal disorders (e.g., as described below under “Renal Disorders”).

[0254] In specific embodiments, a protein, nucleic acid, or antibody of the invention (or fragment or variant thereof) having a “Excretory” recitation in the “Preferred Indication” column of Table 1C, may be used for example, to diagnose, treat, prevent, and/or ameliorate a disease or disorder selected from the group consisting of: bladder cancer, prostate cancer, benign prostatic hyperplasia, bladder disorders (e.g., urinary incontinence, urinary retention, urinary obstruction, urinary tract Infections, interstitial cystitis, prostatitis, neurogenic bladder, hematuria), renal disorders (e.g., hydronephrosis, proteinuria, renal failure, pyelonephritis, urolithiasis, reflux nephropathy, and unilateral obstructive uropathy).

[0255] The recitation of “Neural/Sensory” in the “Preferred Indication” column indicates that the corresponding nucleic acid and protein, or antibody against the same, of the invention (or fragment or variant thereof), may be used for example, to diagnose, treat, prevent, and/or ameliorate diseases and/or disorders relating to neoplastic diseases (e.g., as described below under “Hyperproliferative Disorders”) and diseases or disorders of the nervous system (e.g., as described below under “Neural Activity and Neurological Diseases”).

[0256] In specific embodiments, a protein, nucleic acid, or antibody of the invention (or fragment or variant thereof) having a “Neural/Sensory” recitation in the “Preferred Indication” column of Table 1C, may be used for example, to diagnose, treat, prevent, and/or ameliorate a disease or disorder selected from the group consisting of: brain cancer (e.g., brain stem glioma, brain tumors, central nervous system (Primary) lymphoma, central nervous system lymphoma, cerebellar astrocytoma, and cerebral astrocytoma, neurodegenerative disorders (e.g., Alzheimer's Disease, Creutzfeldt-Jakob Disease, Parkinson's Disease, and Idiopathic Presenile Dementia), encephalomyelitis, cerebral malaria, meningitis, metabolic brain diseases (e.g., phenylketonuria and pyruvate carboxylase deficiency), cerebellar ataxia, ataxia telangiectasia, and AIDS Dementia Complex, schizophrenia, attention deficit disorder, hyperactive attention deficit disorder, autism, and obsessive compulsive disorders.

[0257] The recitation of “Respiratory” in the “Preferred Indication” column indicates that the corresponding nucleic acid and protein, or antibody against the same, of the invention (or fragment or variant thereof), may be used for example, to diagnose, treat, prevent, and/or ameliorate diseases and/or disorders relating to neoplastic diseases (e.g., as described below under “Hyperproliferative Disorders”) and diseases or disorders of the respiratory system (e.g., as described below under “Respiratory Disorders”).

[0258] In specific embodiments, a protein, nucleic acid, or antibody of the invention (or fragment or variant thereof) having a “Respiratory” recitation in the “Preferred Indication” column of Table 1C, may be used for example, to diagnose, treat, prevent, and/or ameliorate a disease or disorder selected from the group consisting of: cancers of the respiratory system such as larynx cancer, pharynx cancer, trachea cancer, epiglottis cancer, lung cancer, squamous cell carcinomas, small cell (oat cell) carcinomas, large cell carcinomas, and adenocarcinomas, allergic reactions, cystic fibrosis, sarcoidosis, histiocytosis X, infiltrative lung diseases (e.g., pulmonary fibrosis and lymphoid interstitial pneumonia), obstructive airway diseases (e.g., asthma, emphysema, chronic or acute bronchitis), occupational lung diseases (e.g., silicosis and asbestosis), pneumonia, and pleurisy.

[0259] The recitation of “Endocrine” in the “Preferred Indication” column indicates that the corresponding nucleic acid and protein, or antibody against the same, of the invention (or fragment or variant thereof), may be used for example, to diagnose, treat, prevent, and/or ameliorate diseases and/or disorders relating to neoplastic diseases (e.g., as described below under “Hyperproliferative Disorders”) and diseases or disorders of the respiratory system (e.g., as described below under “Respiratory Disorders”), renal disorders (e.g., as described below under “Renal Disorders”), and disorders of the endocrine system (e.g., as described below under “Endocrine Disorders”.

[0260] In specific embodiments, a protein, nucleic acid, or antibody of the invention (or fragment or variant thereof) having an “Endocrine” recitation in the “Preferred Indication” column of Table 1C, may be used for example, to diagnose, treat, prevent, and/or ameliorate a disease or disorder selected from the group consisting of: cancers of endocrine tissues and organs (e.g., cancers of the hypothalamus, pituitary gland, thyroid gland, parathyroid glands, pancreas, adrenal glands, ovaries, and testes), diabetes (e.g., diabetes insipidus, type I and type II diabetes mellitus), obesity, disorders related to pituitary glands (e.g., hyperpituitarism, hypopituitarism, and pituitary dwarfism), hypothyroidism, hyperthyroidism, goiter, reproductive disorders (e.g. male and female infertility), disorders related to adrenal glands (e.g., Addison's Disease, corticosteroid deficiency, and Cushing's Syndrome), kidney cancer (e.g., hypernephroma, transitional cell cancer, and Wilm's tumor), diabetic nephropathy, interstitial nephritis, polycystic kidney disease, glomerulonephritis (e.g., IgM mesangial proliferative glomerulonephritis and glomerulonephritis caused by autoimmune disorders; such as Goodpasture's syndrome), and nephrocalcinosis.

[0261] The recitation of “Digestive” in the “Preferred Indication” column indicates that the corresponding nucleic acid and protein, or antibody against the same, of the invention (or fragment or variant thereof), may be used for example, to diagnose, treat, prevent, and/or ameliorate diseases and/or disorders relating to neoplastic diseases (e.g., as described below under “Hyperproliferative Disorders”) and diseases or disorders of the gastrointestinal system (e.g., as described below under “Gastrointestinal Disorders”.

[0262] In specific embodiments, a protein, nucleic acid, or antibody of the invention (or fragment or variant thereof) having a “Digestive” recitation in the “Preferred Indication” column of Table 1C, may be used for example, to diagnose, treat, prevent, and/or ameliorate a disease or disorder selected from the group consisting of: ulcerative colitis, appendicitis, Crohn's disease, hepatitis, hepatic encephalopathy, portal hypertension, cholelithiasis, cancer of the digestive system (e.g., biliary tract cancer, stomach cancer, colon cancer, gastric cancer, pancreatic cancer, cancer of the bile duct, tumors of the colon (e.g., polyps or cancers), and cirrhosis), pancreatitis, ulcerative disease, pyloric stenosis, gastroenteritis, gastritis, gastric atropy, benign tumors of the duodenum, distension, irritable bowel syndrome, malabsorption, congenital disorders of the small intestine, bacterial and parasitic infection, megacolon, Hirschsprung's disease, aganglionic megacolon, acquired megacolon, colitis, anorectal disorders (e.g., anal fistulas, hemorrhoids), congenital disorders of the liver (e.g., Wilson's disease, hemochromatosis, cystic fibrosis, biliary atresia, and alphalantitrypsin deficiency), portal hypertension, cholelithiasis, and jaundice.

[0263] The recitation of “Connective/Epithelial” in the “Preferred Indication” column indicates that the corresponding nucleic acid and protein, or antibody against the same, of the invention (or fragment or variant thereof), may be used for example, to diagnose, treat, prevent, and/or ameliorate diseases and/or disorders relating to neoplastic diseases (e.g., as described below under “Hyperproliferative Disorders”), cellular and genetic abnormalities (e.g., as described below under “Diseases at the Cellular Level”), angiogenesis (e.g., as described below under “Anti-Angiogenesis Activity”), and or to promote or inhibit regeneration (e.g., as described below under “Regeneration”), and wound healing (e.g., as described below under “Wound Healing and Epithelial Cell Proliferation”).

[0264] In specific embodiments, a protein, nucleic acid, or antibody of the invention (or fragment or variant thereof) having a “Connective/Epithelial” recitation in the “Preferred Indication” column of Table 1C, may be used for example, to diagnose, treat, prevent, and/or ameliorate a disease or disorder selected from the group consisting of: connective tissue metaplasia, mixed connective tissue disease, focal epithelial hyperplasia, epithelial metaplasia, mucoepithelial dysplasia, graft v. host disease, polymyositis, cystic hyperplasia, cerebral dysplasia, tissue hypertrophy, Alzheimer's disease, lymphoproliferative disorder, Waldenstron's macroglobulinemia, Crohn's disease, pernicious anemia, idiopathic Addison's disease, glomerulonephritis, bullous pemphigoid, Sjogren's syndrome, diabetes mellitus, cystic fibrosis, osteoblastoma, osteoclastoma, osteosarcoma, chondrosarcoma, osteoporosis, osteocarthritis, periodontal disease, wound healing, relapsing polychondritis, vasculitis, polyarteritis nodosa, Wegener's granulomatosis, cellulitis, rheumatoid arthritis, psoriatic arthritis, discoid lupus erythematosus, systemic lupus erythematosus, scleroderma, CREST syndrome, Sjogren's syndrome, polymyositis, dermatomyositis, mixed connective tissue disease, relapsing polychondritis, vasculitis, Henoch-Schonlein syndrome, erythema nodosum, polyarteritis nodosa, temporal (giant cell) arteritis, Takayasu's arteritis, Wegener's granulomatosis, Reiter's syndrome, Behcet's syndrome, ankylosing spondylitis, cellulitis, keloids, Ehler Danlos syndrome, Marfan syndrome, pseudoxantoma elasticum, osteogenese imperfecta, chondrodysplasias, epidermolysis bullosa, Alport syndrome, and cutis laxa.

TABLE 1C

| Gene | cDNA | |
|---|---|---|
| No. | Clone ID | Preferred Indication Identifier |
| 1 | HSMPG12 | Digestive, Reproductive |
| 2 | HNLJK11 | Digestive |
| 3 | HSMPJ30 | Cancer |
| 4 | HTAOK88 | Cancer |
| 5 | HDSIX96 | Cancer |
| 6 | HATYJ68 | Cancer |
| 7 | HDSJH26 | Cancer |
| 8 | HNMIG09 | Cardiovascular, Neural/Sensory |
| 9 | HLCMJ69 | Cancer |
| 10 | HNMIB80 | Cancer |
| 11 | HDLLA60 | Cancer |
| 12 | HDSIX56 | Immune/Hematopoietic |
| 13 | HFLEZ28 | Immune/Hematopoietic, Reproductive |
| 14 | HDMSA74 | Cardiovascular, Musculoskeletal |
| 15 | HDMSQ09 | Cancer |
| 16 | HDMTG72 | Cancer |
| 17 | HTAOQ18 | Cancer |
| 18 | HLAPM62 | Cancer |
| 19 | HDLWY45 | Cancer |
| 20 | HDMKF05 | Digestive |
| 21 | HDMRQ63 | Cancer |
| 22 | HDMKE89 | Cancer |
| 23 | HNMIK76 | Cardiovascular |
| 24 | HDHMA62 | Neural/Sensory |
| 25 | HDQDT24 | Cancer |
| 26 | HEOOV77 | Digestive, Immune/Hematopoietic |
| 27 | HERHG93 | Cancer |
| 28 | HESXG41 | Cancer |
| 29 | HFKFO58 | Cancer |
| 30 | HFPKB52 | Cancer |
| 31 | HGARX38 | Digestive |
| 32 | HMAGO59 | Digestive, Immune/Hematopoietic, |
| | | Reproductive |
| 33 | HMTSX03 | Cancer |
| 34 | HMTUZ60 | Cancer |
| 35 | HNFKC14 | Cancer |
| 36 | HNSQN50 | Digestive, Mixed Fetal, Reproductive |
| 37 | HNSUM63 | Digestive, Endocrine, Reproductive |
| 38 | HNSWV68 | Cancer |
| 39 | HOC2T95 | Digestive |
| 40 | HODNV05 | Digestive |
| 41 | HPDSA48 | Cancer |
| 42 | HSKIT24 | Cancer |
| 43 | HSVAA83 | Cancer |
| 44 | HUTJT76 | Cancer |
| 45 | HUVHZ75 | Reproductive |
| 46 | HVAQO59 | Cancer |
| 47 | HWHPA16 | Connective/Epithelial, Digestive |
| 48 | HYCAD48 | Cancer |
| 49 | HHFZF42 | Cancer |
| 50 | HHAQY41 | Cancer |
| 51 | HNSRC60 | Cancer |
| 52 | HFDUT84 | Cancer |
| 53 | HHA1S21 | Cancer |
| 54 | HHMQL78 | Digestive, Immune/Hematopoietic, |
| | | Respiratory |
| 55 | HNSMZ53 | Digestive |
| 56 | HNGMJ63 | Immune/Hematopoietic |
| 57 | HNSIT44 | Digestive |
| 58 | HHMSF21 | Digestive |
| 59 | HNSES94 | Digestive, Immune/Hematopoietic |
| 60 | HH1MU43 | Endocrine |
| 61 | HHMNV67 | Digestive |
| 62 | HMTSU69 | Cancer |
| 63 | HMWCU24 | Cancer |
| 64 | HCPCI91 | Cancer |
| 65 | HDMSA08 | Cancer |
| 66 | HCPBA16 | Cancer |
| 67 | HCPBM77 | Cancer |
| 68 | HCPBR37 | Cancer |
| 69 | HIEAG70 | Cancer |
| 70 | HDMTL77 | Cardiovascular, Mixed Fetal |
| 71 | HDMTP20 | Cancer |
| 72 | HIEAP38 | Cancer |
| 73 | HIEBT86 | Cancer |
| 74 | HIGAN47 | Cancer |
| 75 | HDMSW74 | Cancer |
| 76 | HIGBG18 | Digestive |
| 77 | HDMTE62 | Cancer |
| 78 | HCPRA19 | Cancer |
| 79 | HCPCB26 | Cancer |
| 80 | HCPCN28 | Cancer |
| 81 | HABCP53 | Cancer |
| 82 | HCPBO66 | Cancer |
| 83 | HIGAT14 | Cancer |
| 84 | HESYT64 | Digestive, Immune/Hematopoietic, |
| | | Neural/Sensory |
| 85 | HALJC43 | Reproductive |
| 86 | HESZO72 | Cancer |
| 87 | HESZV10 | Cancer |
| 88 | HESYL64 | Immune/Hematopoietic |
| 89 | HESYN37 | Cancer |

Description of Table 1D

[0265] Table 1D provides information related to biological activities and preferred indications for polynucleotides and polypeptides of the invention (including antibodies, agonists, and/or antagonists thereof). Table 1D also provides information related to assays which may be used to test polynucleotides and polypeptides of the invention (including antibodies, agonists, and/or antagonists thereof) for the corresponding biological activities. The first column (“Gene No.”) provides the gene number in the application for each clone identifier. The second column (“cDNA Clone ID:”) provides the unique clone identifier for each clone as previously described and indicated in Tables 1A, 1B, and 1C. The third column (“AA SEQ ID NO:Y”) indicates the Sequence Listing SEQ ID Number for polypeptide sequences encoded by the corresponding cDNA clones (also as indicated in Tables 1A, 1B). The fourth column (“Biological Activity”) indicates a biological activity corresponding to the indicated polypeptides (or polynucleotides encoding said polypeptides). The fifth column (“Exemplary Activity Assay”) further describes the corresponding biological activity and provides information pertaining to the various types of assays which may be performed to test, demonstrate, or quantify the corresponding biological activity. The sixth column (“Preferred Indications”) describes particular embodiments of the invention and indications (e.g. pathologies, diseases, disorders, abnormalities, etc.) for which polynucleotides and polypeptides of the invention (including antibodies, agonists, and/or antagonists thereof) may be used in detecting, preventing, diagnosing, prognosticating, treating, and/or ameliorating.

[0266] Table 1D describes the use of, inter alia, FMAT technology for testing or demonstrating various biological activities. Fluorometric microvolume assay technology (FMAT) is a fluorescence-based system which provides a means to perform nonradioactive cell- and bead-based assays to detect activation of cell signal transduction pathways. This technology was designed specifically for ligand binding and immunological assays. Using this technology, fluorescent cells or beads at the bottom of the well are detected as localized areas of concentrated fluorescence using a data processing system. Unbound fluorophore comprising the background signal is ignored, allowing for a wide variety of homogeneous assays. FMAT technology may be used for peptide ligand binding assays, immunofluorescence, apoptosis, cytotoxicity, and bead-based immunocapture assays. See, Miraglia S et al., “Homogeneous cell and bead based assays for highthroughput screening using fluorometric microvolume assay technology,” Journal of Biomolecular Screening; 4:193-204 (1999). In particular, FMAT technology may be used to test, confirm, and/or identify the ability of polypeptides (including polypeptide fragments and variants) to activate signal transduction pathways. For example, FMAT technology may be used to test, confirm, and/or identify the ability of polypeptides to upregulate production of immunomodulatory proteins (such as, for example, interleukins, GM-CSF, Rantes, and Tumor Necrosis factors, as well as other cellular regulators (e.g., insulin)).

[0267] Table 1D also describes the use of kinase assays for testing, demonstrating, or quantifying biological activity. In this regard, the phosphorylation and de-phosphorylation of specific amino acid residues (e.g., Tyrosine, Serine, Threonine) on cell-signal transduction proteins provides a fast, reversible means for activation and de-activation of cellular signal transduction pathways. Moreover, cell signal transduction via phosphorylation/de-phosphorylation is crucial to the regulation of a wide variety of cellular processes (e.g. proliferation, differentiation, migration, apoptosis, etc.). Accordingly, kinase assays provide a powerful tool useful for testing, confirming, and/or identifying polypeptides (including polypeptide fragments and variants) that mediate cell signal transduction events via protein phosphorylation. See, e.g., Forrer, P., Tamaskovic R., and Jaussi, R. “Enzyme-Linked Immunosorbent Assay for Measurement of JNK, ERK, and p38 Kinase Activities” Biol. Chem. 379(8-9): 1101-1110 (1998).

TABLE 1D

| | | AA SEQ | Biological | | |
|---|---|---|---|---|---|
| Gene No. | cDNA Clone ID | ID NO: Y | Activity | Exemplary Activity Assay | Preferred Indication |
| 8 | HNM1G09 | 211 | Analysis of viability and/or | Assays for the regulation (i.e. increases or decreases) | Highly preferred indications include neoplastic diseases |
| | | | proliferation of OE33 esophageal | of viability and proliferation of cells in vitro are well- | (e.g. cancer) such as described herein under the heading |
| | | | tumor cells. | known in the art and may be used or routinely | “Hyperproliferative Disorders” (particularly including, but |
| | | | | modified to assess the ability of polypeptides of the | not limited to, cancer involving cells of the esophageal |
| | | | | invention (including antibodies and agonists or | and/or the gastrointestinal tract). Highly preferred |
| | | | | antagonists of the invention) to regulate viability and | embodiments of the invention include methods of |
| | | | | proliferation of tumor cells and cell lines. For | preventing, detecting, diagnosing, treating and/or |
| | | | | example, the CellTiter-Glo ™ Luminescent Cell | ameliorating cancer and hyperproliferative disorders |
| | | | | Viability Assay (Promega Corp., Madison, WI, USA) | involving the gastrointestinal tract, particularly the |
| | | | | can be used to measure the number of viable cells in | esophagous. |
| | | | | culture based on quantitation of the ATP present | Another highly preferred indication includes |
| | | | | which signals the presence of metabolically active | gastroesophageal reflux. Highly preferred embodiments of |
| | | | | cells. Inappropriate proliferation of cancer cells is a | the invention include methods of preventing, detecting, |
| | | | | hallmark of cancer development and progression, and | diagnosing, treating and/or ameliorating gastroesophageal |
| | | | | it is of therapeutic interest to identify factors that can | reflux. |
| | | | | affect tumor cell proliferation. This assay is used to | |
| | | | | identify agents that affect OE33 viability or | |
| | | | | proliferation. OE33 is a human Barrett's-derived | |
| | | | | adenocarcinoma esophageal carcinoma cell line. To | |
| | | | | enhance the sensitivity, assays were run in | |
| | | | | combination with camptothecin a chemotherapeutic | |
| | | | | agent in use in clinical cancer therapy. | |
| | | | | Literature using OE33 cells in similar type assays: | |
| | | | | Kim A H, Lebman D A, Dietz C M, Snyder S R, Eley | |
| | | | | K W, Chung T D Transforming growth factor-beta is | |
| | | | | an endogenous radioresistance factor in the | |
| | | | | esophageal adenocarcinoma cell line OE-33. Int J | |
| | | | | Oncol. 2003 Dec; 23(6): 1593-9; and | |
| | | | | Haigh C R, Attwood S E, Thompson D G, Jankowski | |
| | | | | J A, Kirton C M, Pritchard D M, Varro A, Dimaline R. | |
| | | | | Gastrin induces proliferation in Barrett's metaplasia | |
| | | | | through activation of the CCK2 receptor. | |
| | | | | Gastroenterology. 2003 Mar; 124(3): 615-25; both of | |
| | | | | which are incorporated by reference in their entireties. | |
| 12 | HDS1X56 | 215 | Production of IL-8 by immune cells | Assay that measures the production of the chemokine | Highly preferred indications include eosinophilia, asthma, |
| | | | (such as the human EOL-1 eosinophil | interleukin-8 (IL-8) from immune cells (such as the | allergy, hypersensitivity reactions, inflammation, and |
| | | | cells) | EOL-1 human eosinophil cell line) are well known in | inflammatory disorders. Additional highly preferred |
| | | | | the art (for example, measurement of IL-8 production | indications include immune and hematopoietic disorders |
| | | | | by FMAT) and may be used or routinely modified to | (e.g., as described below under “Immune Activity”, and |
| | | | | assess the ability of polypeptides of the invention | “Blood-Related Disorders”), autoimmune diseases (e.g., |
| | | | | (including antibodies and agonists or antagonists of | rheumatoid arthritis, systemic lupus erythematosis, Crohn″s |
| | | | | the invention) to promote or inhibit. Eosinophils are a | disease, multiple sclerosis and/or as described below), |
| | | | | type of immune cell important in allergic responses; | immunodeficiencies (e.g., as described below). Highly |
| | | | | they are recruited to tissues and mediate the | preferred indications also include boosting or inhibiting |
| | | | | inflammatory response of late stage allergic reaction. | immune cell proliferation. Preferred indications include |
| | | | | IL8 is a strong immunomodulator and may have a | neoplastic diseases (e.g., leukemia, lymphoma, and/or as |
| | | | | potential proinflammatory role in immunological | described below under “Hyperproliferative Disorders”). |
| | | | | diseases and disorders (such as allergy and asthma). | Highly preferred indications include boosting an |
| | | | | | eosinophil-mediated immune response, and suppressing an |
| | | | | | eosinophil-mediated immune response. |
| 13 | HFLEZ28 | 216 | IgG production by primary human B | B Cell CoStimulatory Assay: 293T epithelial cells (a | A highly preferred embodiment of the invention includes |
| | | | cells is determined after coculture | highly transfectable derivative of the 293 cell line into | a method for inhibiting (e.g., reducing) antibody (in |
| | | | with transfected 293T cells in | which the temperature sensitive gene for SV40 T- | particular, IgG) production. Highly preferred indications |
| | | | the presence of Staphylococcus | antigen was inserted) are transfected with SID | include eosinophilia, asthma, allergy, hypersensitivity |
| | | | aureus Cowan I (SAC). | construct DNA. Cells are cultured for 24 hours, then | reactions, inflammation, and inflammatory disorders. |
| | | | | irradiated 20 min to inhibit their proliferation. | Additional highly preferred indications include |
| | | | | Primary B cells are then added and cells are | autoimmune diseases (e.g., rheumatoid arthritis, |
| | | | | cocultured in the presence or absence of | systemic lupus erythematosis, Crohn″s disease, multiple |
| | | | | Staphylococcus aureus Cowan I (SAC), a B cell | sclerosis and/or as described below). Highly preferred |
| | | | | costimulator, for 96 hours. Conditioned media is | indications also include inhibiting immune cell |
| | | | | collected and analyzed for IgG using FMAT. This | proliferation, such as suppressing a B-cell-mediated |
| | | | | protocol will allow detection of activity of either | immune response. |
| | | | | secreted or membrane bound SID clones that can | A highly preferred embodiment of the invention also |
| | | | | enhance or repress B cell IgG secretion. Secreted IgG | includes a method for stimulating antibody (in particular, |
| | | | | molecules serve as effectors of humoral immunity by | IgG) production. Highly preferred indications also |
| | | | | neutralizing antigens. | include boosting immune cell proliferation such as |
| | | | | | boosting a B-cell mediated immune response. immune |
| | | | | | disorders (e.g., as described below under “Immune |
| | | | | | Activity”), infection (e.g., an infectious disease as |
| | | | | | described below under “Infectious Disease”), |
| | | | | | immunodeficiencies (e.g., as described below). |
| | | | | | Preferred indications include neoplastic diseases (e.g., |
| | | | | | leukemia, lymphoma, and/or as described below under |
| | | | | | “Hyperproliferative Disorders”). |
| 13 | HFLEZ28 | 216 | Analysis of viability and/or | Assays for the regulation (i.e. increases or decreases) | Highly preferred indications include neoplastic diseases |
| | | | proliferation of in SW480 (TRAIL- | of viability and proliferation of cells in vitro are well- | (e.g. cancer) such as described herein under the heading |
| | | | sensitive human colorectal | known in the art and may be used or routinely | “Hyperproliferative Disorders” (particularly including, but |
| | | | carcinoma cell line (ATCC CCL- | modified to assess the ability of polypeptides of the | not limited to, cancer involving cells of the gastrointestinal |
| | | | 228)) cells. | invention (including antibodies and agonists or | tract, particularly the colon). Highly preferred |
| | | | | antagonists of the invention) to regulate viability and | embodiments of the invention include methods of |
| | | | | proliferation of tumor cells and cell lines. For | preventing, detecting, diagnosing, treating and/or |
| | | | | example, the CellTiter-Glo ™ Luminescent Cell | ameliorating cancer and hyperproliferative disorders |
| | | | | Viability Assay (Promega Corp., Madison, WI, USA) | involving the gastrointestinal tract, particularly the colon. |
| | | | | can be used to measure the number of viable cells in | |
| | | | | culture based on quantitation of the ATP present | |
| | | | | which signals the presence of metabolically active | |
| | | | | cells. Inappropriate proliferation of cancer cells is a | |
| | | | | hallmark of cancer development and progression, and | |
| | | | | it is of therapeutic interest to identify factors that can | |
| | | | | affect tumor cell proliferation. This assay is used to | |
| | | | | identify agents that affect SW380 viability or | |
| | | | | proliferation. SW480 is a TRAIL-sensitive human | |
| | | | | colorectal carcinoma cell line (ATCC CCL-228). See, | |
| | | | | McNutt et al., Lab Invest. 44: 309-23 (1981), the | |
| | | | | contents of which are herein incorporated by reference | |
| | | | | in its entirety. | |
| 15 | HDMSQ09 | 218 | Identification of factors that | Glucose production assay: H4IIE were co-treated with | A highly preferred indication is diabetes. Additional highly |
| | | | antagonize insulin-inhibition of | insulin and transfected supernatants for 15-18 hours. | preferred indications include complications associated with |
| | | | glucose production in H4IIE | Glucose concentration in the conditioned media was | diabetes (e.g., diabetic retinopathy, diabetic nephropathy, |
| | | | hepatoma. | measured to determine if insulin-mediated inhibition | kidney disease (e.g., renal failure, nephropathy and/or other |
| | | | | of glucose production was antagonized by the tested | diseases and disorders as described in the “Renal Disorders” |
| | | | | samples. Elevated hepatic glucose production plays a | section below), diabetic neuropathy, nerve disease and |
| | | | | central role in the increased glycemia observed in type | nerve damage (e.g., due to diabetic neuropathy), blood |
| | | | | II diabetes. | vessel blockage, heart disease, stroke, impotence (e.g., due |
| | | | | | to diabetic neuropathy or blood vessel blockage), seizures, |
| | | | | | mental confusion, drowsiness, nonketotic hyperglycemic- |
| | | | | | hyperosmolar coma, cardiovascular disease (e.g., heart |
| | | | | | disease, atherosclerosis, microvascular disease, |
| | | | | | hypertension, stroke, and other diseases and disorders as |
| | | | | | described in the “Cardiovascular Disorders” section below), |
| | | | | | dyslipidemia, endocrine disorders (as described in the |
| | | | | | “Endocrine Disorders” section below), neuropathy, vision |
| | | | | | impairment (e.g., diabetic retinopathy and blindness), ulcers |
| | | | | | and impaired wound healing, and infection (e.g., infectious |
| | | | | | diseases and disorders as described in the “Infectious |
| | | | | | Diseases” section below, especially of the urinary tract and |
| | | | | | skin). Highly preferred indications also include obesity, |
| | | | | | weight gain, and weight loss, as well as complications |
| | | | | | associated with obesity, weight gain, and weight loss. |
| | | | | | Preferred embodiments of the invention include methods of |
| | | | | | preventing, detecting, diagnosing, treating and/or |
| | | | | | ameliorating the above mentioned conditions, disorders, |
| | | | | | and diseases. |
| 18 | HLAPM62 | 221 | Analysis of viability and/or | Assays for the regulation (i.e. increases or decreases) | Highly preferred indications include neoplastic diseases |
| | | | proliferation of OE33 esophageal | of viability and proliferation of cells in vitro are well- | (e.g. cancer) such as described herein under the heading |
| | | | tumor cells. | known in the art and may be used or routinely | “Hyperproliferative Disorders” (particularly including, but |
| | | | | modified to assess the ability of polypeptides of the | not limited to, cancer involving cells of the esophageal |
| | | | | invention (including antibodies and agonists or | and/or the gastrointestinal tract). Highly preferred |
| | | | | antagonists of the invention) to regulate viability and | embodiments of the invention include methods of |
| | | | | proliferation of tumor cells and cell lines. For | preventing, detecting, diagnosing, treating and/or |
| | | | | example, the CellTiter-Glo ™ Luminescent Cell | ameliorating cancer and hyperproliferative disorders |
| | | | | Viability Assay (Promega Corp., Madison, WI, USA) | involving the gastrointestinal tract, particularly the |
| | | | | can be used to measure the number of viable cells in | esophagous. |
| | | | | culture based on quantitation of the ATP present | Another highly preferred indication includes |
| | | | | which signals the presence of metabolically active | gastroesophageal reflux. Highly preferred embodiments of |
| | | | | cells. Inappropriate proliferation of cancer cells is a | the invention include methods of preventing, detecting, |
| | | | | hallmark of cancer development and progression, and | diagnosing, treating and/or ameliorating gastroesophageal |
| | | | | it is of therapeutic interest to identify factors that can | reflux. |
| | | | | affect tumor cell proliferation. This assay is used to | |
| | | | | identify agents that affect OE33 viability or | |
| | | | | proliferation. OE33 is a human Barrett's-derived | |
| | | | | adenocarcinoma esophageal carcinoma cell line. To | |
| | | | | enhance the sensitivity, assays were run in | |
| | | | | combination with camptothecin a chemotherapeutic | |
| | | | | agent in use in clinical cancer therapy. | |
| | | | | Literature using OE33 cells in similar type assays: | |
| | | | | Kim A H, Lebman D A, Dietz C M, Snyder S R, Eley | |
| | | | | K W, Chung T D Transforming growth factor-beta is | |
| | | | | an endogenous radioresistance factor in the | |
| | | | | esophageal adenocarcinoma cell line OE-33. Int J | |
| | | | | Oncol. 2003 Dec; 23(6): 1593-9; and | |
| | | | | Haigh C R, Attwood S E, Thompson D G, Jankowski | |
| | | | | J A, Kirton C M, Pritchard D M, Varro A, Dimaline R. | |
| | | | | Gastrin induces proliferation in Barrett's metaplasia | |
| | | | | through activation of the CCK2 receptor. | |
| | | | | Gastroenterology. 2003 Mar; 124(3): 615-25; both of | |
| | | | | which are incorporated by reference in their entireties. | |
| 19 | HDLWY45 | 222 | TNFa production by primary human T- | T Cell CoStimulatory Assays: 2B9 (stably expressing | Highly preferred indications include eosinophilia, asthma, |
| | | | cells determined after coculture | CD86, a T cell costimulator) epithelial cells are | allergy, hypersensitivity reactions, inflammation, and |
| | | | with a transfected 2B9 epithelial | transfected with the clone construct DNA of interest. | inflammatory disorders. An enhanced tumour-necrosis |
| | | | cells (with the gene of interest) | Cells are cultured for 24 hours, then irradiated 20 min | factor-alpha (TNF-alpha) synthesis is associated with the |
| | | | stably expressing CD86, a T cell | to inhibit their proliferation. Primary T cells are then | development of rheumatoid arthritis, psoriatic arthritis and |
| | | | costimutator. | added and cells are cocultured for 48 hours. | inflammatory bowel disease, thus, highly preferred |
| | | | | Conditioned media is collected and analyzed for | indications also include inhibiting (e.g., reducing TNFa |
| | | | | TNFa protein production using FMAT. This protocol | production. Additional highly preferred indications include |
| | | | | will allow detection of activity of either secreted or | immune disorders (e.g., as described below under “Immune |
| | | | | membrane bound clones that can enhance or repress T | Activity”), chronic inflammatory diseases, autoimmune |
| | | | | cell TNFa secretion. Tumor Necrosis Factor alpha | diseases (e.g., rheumatoid arthritis, systemic lupus |
| | | | | (TNFa) is a cytokine that exerts a wide range of | erythematosis, Crohn″s disease, multiple sclerosis and/or as |
| | | | | inflammatory and cytotoxic effects on a variety of | described below), immunodeficiencies (e.g., as described |
| | | | | cells. TNF is a major mediator of inflammation, viral | below). Preferred indications include neoplastic diseases |
| | | | | replication, tumor metastasis, transplant rejection, | (e.g., leukemia, lymphoma, and/or as described below |
| | | | | rheumatoid arthritis, and septic shock. | under “Hyperproliferative Disorders”). |
| | | | | Literature using similar methods to examine | |
| | | | | regulation of T cell TNFa production: | |
| | | | | Ariel A, Chiang N, Arita M, Petasis N A, Serhan C N. | |
| | | | | Aspirin-triggered lipoxin A4 and B4 analogs block | |
| | | | | extracellular signal-regulated kinase-dependent TNF- | |
| | | | | alpha secretion from human T cells. Immunol. 2003 | |
| | | | | Jun 15; 170(12):6266-72; and | |
| | | | | Bleijs D A, de Waal-Malefyt R, Figdor C G, van | |
| | | | | Kooyk Y. Co-stimulation of T cells results in distinct | |
| | | | | IL-10 and TNF-alpha cytokine profiles dependent on | |
| | | | | binding to ICAM-1, ICAM-2 or ICAM-3. Eur J | |
| | | | | Immunol. 1999 Jul; 29(7): 2248-58; both of which are | |
| | | | | incorporated by reference in their entireties. | |
| 19 | HDLWY45 | 222 | Analysis of viability and/or | Assays for the regulation (i.e. increases or decreases) | Highly preferred indications include neoplastic diseases |
| | | | proliferation of OE33 esophageal | of viability and proliferation of cells in vitro are well- | (e.g. cancer) such as described herein under the heading |
| | | | tumor cells. | known in the art and may be used or routinely | “Hyperproliferative Disorders” (particularly including, but |
| | | | | modified to assess the ability of polypeptides of the | not limited to, cancer involving cells of the esophageal |
| | | | | invention (including antibodies and agonists or | and/or the gastrointestinal tract). Highly preferred |
| | | | | antagonists of the invention) to regulate viability and | embodiments of the invention include methods of |
| | | | | proliferation of tumor cells and cell lines. For | preventing, detecting, diagnosing, treating and/or |
| | | | | example, the CellTiter-Glo ™ Luminescent Cell | ameliorating cancer and hyperproliferative disorders |
| | | | | Viability Assay (Promega Corp., Madison, WI, USA) | involving the gastrointestinal tract, particularly the |
| | | | | can be used to measure the number of viable cells in | esophagous. |
| | | | | culture based on quantitation of the ATP present | Another highly preferred indication includes |
| | | | | which signals the presence of metabolically active | gastroesophageal reflux. Highly preferred embodiments of |
| | | | | cells. Inappropriate proliferation of cancer cells is a | the invention include methods of preventing, detecting, |
| | | | | hallmark of cancer development and progression, and | diagnosing, treating and/or ameliorating gastroesophageal |
| | | | | it is of therapeutic interest to identify factors that | reflux. |
| | | | | can affect tumor cell proliferation. This assay is used to | |
| | | | | identify agents that affect 0E33 viability or | |
| | | | | proliferation. 0E33 is a human Barrett's-derived | |
| | | | | adenocarcinoma esophageal carcinoma cell line. To | |
| | | | | enhance the sensitivity, assays were run in | |
| | | | | combination with camptothecin a chemotherapeutic | |
| | | | | agent in use in clinical cancer therapy. | |
| | | | | Literature using OE33 cells in similar type assays: | |
| | | | | Kim A H, Lebman D A, Dietz C M, Snyder S R, Eley | |
| | | | | K W, Chung T D Transforming growth factor-beta is | |
| | | | | an endogenous radioresistance factor in the | |
| | | | | esophageal adenocarcinoma cell line OE-33. Int J | |
| | | | | Oncol. 2003 Dec; 23(6): 1593-9; and | |
| | | | | Haigh C R, Attwood S E, Thompson D G, Jankowski | |
| | | | | J A, Kirton C M, Pritchard D M, Varro A, Dimaline R. | |
| | | | | Gastrin induces proliferation in Barrett's metaplasia | |
| | | | | through activation of the CCK2 receptor. | |
| | | | | Gastroenterology. 2003 Mar; 124(3): 615-25; both of | |
| | | | | which are incorporated by reference in their entireties. | |
| 20 | HDMKF05 | 223 | IgG production by primary human B | B Cell CoStimulatory Assay: 293T epithelial cells (a | A highly preferred embodiment of the invention includes |
| | | | cells is determined after coculture | highly transfectable derivative of the 293 cell line into | a method for inhibiting (e.g., reducing) antibody (in |
| | | | with transfected 293T cells in | which the temperature sensitive gene for SV40 T- | particular, IgG) production. Highly preferred indications |
| | | | the presence of Staphylococcus | antigen was inserted) are transfected with SID | include eosinophilia, asthma, allergy, hypersensitivity |
| | | | aureus Cowan I (SAC). | construct DNA. Cells are cultured for 24 hours, then | reactions, inflammation, and inflammatory disorders. |
| | | | | irradiated 20 min to inhibit their proliferation. | Additional highly preferred indications include |
| | | | | Primary B cells are then added and cells are | autoimmune diseases (e.g., rheumatoid arthritis, |
| | | | | cocultured in the presence or absence of | systemic lupus erythematosis, Crohn″s disease, multiple |
| | | | | Staphylococcus aureusCowan I (SAC), a B cell | sclerosis and/or as described below). Highly preferred |
| | | | | costimulator, for 96 hours. Conditioned media is | indications also include inhibiting immune cell |
| | | | | collected and analyzed for IgG using FMAT. This | proliferation, such as suppressing a B-cell-mediated |
| | | | | protocol will allow detection of activity of either | immune response. |
| | | | | secreted or membrane bound SID clones that can | A highly preferred embodiment of the invention also |
| | | | | enhance or repress B cell IgG secretion. Secreted IgG | includes a method for stimulating antibody (in particular, |
| | | | | molecules serve as effectors of humoral immunity by | IgG) production. Highly preferred indications also include |
| | | | | neutralizing antigens. | boosting immune cell proliferation such as boosting a B- |
| | | | | | cell mediated immune response, immune disorders (e.g., as |
| | | | | | described below under “Immune Activity”), infection (e.g., |
| | | | | | an infectious disease as described below under “Infectious |
| | | | | | Disease”), immunodeficiencies (e.g., as described below). |
| | | | | | Preferred indications include neoplastic diseases (e.g., |
| | | | | | leukemia, lymphoma, and/or as described below under |
| | | | | | “Hyperproliferative Disorders”). |
| 22 | HDMKE89 | 225 | IgG production by primary human B | B Cell CoStimulatory Assay: 293T epithelial cells (a | A highly preferred embodiment of the invention includes |
| | | | cells is determine after coculture | highly transfectable derivative of the 293 cell line into | a method for inhibiting (e.g., reducing) antibody (in |
| | | | with transfected 293T cells in | which the temperature sensitive gene for SV40 T- | particular, IgG) production. Highly preferred indications |
| | | | the presence of Staphylococcus | antigen was inserted) are transfected with SID | include eosinophilia, asthma, allergy, hypersensitivity |
| | | | aureus Cowan I (SAC). | construct DNA. Cells are cultured for 24 hours, then | reactions, inflammation, and inflammatory disorders. |
| | | | | irradiated 20 min to inhibit their proliferation. | Additional highly preferred indications include |
| | | | | Primary B cells are then added and cells are | autoimmune diseases (e.g., rheumatoid arthritis, |
| | | | | cocultured in the presence or absence of | systemic lupus erythematosis, Crohn″s disease, multiple |
| | | | | Staphylococcus aureus Cowan I (SAC), a B cell | sclerosis and/or as described below). Highly preferred |
| | | | | costimulator, for 96 hours. Conditioned media is | indications also include inhibiting immune cell |
| | | | | collected and analyzed for IgG using FMAT. This | proliferation, such as suppressing a B-cell-mediated |
| | | | | protocol will allow detection of activity of either | immune response. |
| | | | | secreted or membrane bound SID clones that can | A highly preferred embodiment of the invention also |
| | | | | enhance or repress B cell IgG secretion. Secreted IgG | includes a method for stimulating antibody (in particular, |
| | | | | molecules serve as effectors of humoral immunity by | IgG) production. Highly preferred indications also include |
| | | | | neutralizing antigens. | boosting immune cell proliferation such as boosting a B- |
| | | | | | cell mediated immune response, immune disorders (e.g., as |
| | | | | | described below under “Immune Activity”), infection (e.g., |
| | | | | | an infectious disease as described below under “Infectious |
| | | | | | Disease”), immunodeficiencies (e.g., as described below). |
| | | | | | Preferred indications include neoplastic diseases (e.g., |
| | | | | | leukemia, lymphoma, and/or as described below under |
| | | | | | “Hyperproliferative Disorders”). |
| 25 | HDQDT24 | 228 | Inhibition of squalene synthetase | Reporter Assay: construct contains regulatory and | A highly preferred indication is diabetes. Additional highly |
| | | | gene transcription. | coding sequence of squalene synthetase, the first | preferred indications include complications associated with |
| | | | | specific enzyme in the cholesterol biosynthetic | diabetes (e.g., diabetic retinopathy, diabetic nephropathy, |
| | | | | pathway. See Jiang, et al., J. Biol. Chem. 268: 12818- | kidney disease (e.g., renal failure, nephropathy and/or other |
| | | | | 128241(993), the contents of which are herein | diseases and disorders as described in the “Renal Disorders” |
| | | | | incorporated by reference in its entirety. Cells were | section below), diabetic neuropathy, nerve disease and |
| | | | | treated with SID supernatants, and SEAP activity was | nerve damage (e.g., due to diabetic neuropathy), blood |
| | | | | measured after 72 hours. HepG2 is a human | vessel blockage, heart disease, stroke, impotence (e.g., due |
| | | | | hepatocellular carcinoma cell line (ATCC HB-8065). | to diabetic neuropathy or blood vessel blockage), seizures, |
| | | | | See Knowles et al., Science. 209: 497-9 (1980), the | mental confusion, drowsiness, nonketotic hyperglycemic- |
| | | | | contents of which are herein incorporated by reference | hyperosmolar coma, cardiovascular disease (e.g., heart |
| | | | | in its entirety. | disease, atherosclerosis, microvascular disease, |
| | | | | | hypertension, stroke, and other diseases and disorders as |
| | | | | | described in the “Cardiovascular Disorders” section below), |
| | | | | | dyslipidemia, endocrine disorders (as described in the |
| | | | | | “Endocrine Disorders” section below), neuropathy, vision |
| | | | | | impairment (e.g., diabetic retinopathy and blindness), ulcers |
| | | | | | and impaired wound healing, and infection (e.g., infectious |
| | | | | | diseases and disorders as described in the “Infectious |
| | | | | | Diseases” section below, especially of the urinary tract and |
| | | | | | skin). Highly preferred indications also include obesity, |
| | | | | | weight gain, and weight loss, as well as complications |
| | | | | | associated with obesity, weight gain, and weight loss. |
| | | | | | Preferred embodiments of the invention include methods of |
| | | | | | preventing, detecting, diagnosing, treating and/or |
| | | | | | ameliorating the above mentioned conditions, disorders, |
| | | | | | and diseases. |
| 39 | HOC2T95 | 242 | Production of VCAM in endothelial | Assays for measuring expression of VCAM are well- | Highly preferred indications include inflammation (acute |
| | | | cells (such as human umbilical | known in the art and may be used or routinely | and chronic), restnosis, atherosclerosis, asthma and allergy. |
| | | | vein endothelial cells (HUVEC)) | modified to assess the ability of polypeptides of the | Highly preferred indications include inflammation and |
| | | | | invention (including antibodies and agonists or | inflammatory disorders, immunological disorders, |
| | | | | antagonists of the invention) to regulate VCAM | neoplastic disorders (e.g. cancer/tumorigenesis), and |
| | | | | expression. For example, FMAT may be used to | cardiovascular disorders (such as described below under |
| | | | | measure the upregulation of cell surface VCAM-1 | “Immune Activity”, “Blood-Related Disorders”, |
| | | | | expression in endothelial cells. Endothelial cells are | “Hyperproliferative Disorders” and/or “Cardiovascular |
| | | | | cells that line blood vessels, and are involved in | Disorders”). Highly preferred indications include |
| | | | | functions that include, but are not limited to, | neoplasms and cancers such as, for example, leukemia, |
| | | | | angiogenesis, vascular permeability, vascular tone, | lymphoma, melanoma, renal cell carcinoma, and prostate, |
| | | | | and immune cell extravasation. Exemplary | breast, lung, colon, pancreatic, esophageal, stomach, brain, |
| | | | | endothelial cells that may be used according to these | liver and urinary cancer. Other preferred indications include |
| | | | | assays include human umbilical vein endothelial cells | benign dysproliferative disorders and pre-neoplastic |
| | | | | (HUVEC), which are available from commercial | conditions, such as, for example, hyperplasia, metaplasia, |
| | | | | sources. The expression of VCAM (CD106), a | and/or dysplasia. |
| | | | | membrane-associated protein, can be upregulated by | |
| | | | | cytokines or other factors, and contributes to the | |
| | | | | extravasation of lymphocytes, leucocytes and other | |
| | | | | immune cells from blood vessels; thus VCAM | |
| | | | | expression plays a role in promoting immune and | |
| | | | | inflammatory responses. | |
| 50 | HHAQY41 | 253 | Proliferation of pre-adipose cells | Assays for the regulation (i.e. increases or decreases) | Highly preferred indications include neoplastic diseases |
| | | | (such as 3T3-L1 cells) | of viability and proliferation of cells in vitro are well- | (e.g. cancer) such as described herein under the heading |
| | | | | known in the art and may be used or routinely | “Hyperproliferative Disorders”. Highly preferred |
| | | | | modified to assess the ability of polypeptides of the | embodiments of the invention include methods of |
| | | | | invention (including antibodies and agonists or | preventing, detecting, diagnosing, treating and/or |
| | | | | antagonists of the invention) to regulate viability and | ameliorating neoplasms and cancer, such as, but are not |
| | | | | proliferation of pre-adipose cells and cell lines. For | limited to, lipoma, liposarcoma, lymphoma, leukemia and |
| | | | | example, the CellTiter-Gloô Luminescent Cell | breast, colon, and kidney cancer. Additional highly |
| | | | | Viability Assay (Promega Corp., Madison, WI, USA) | preferred indications include melanoma, prostate, lung, |
| | | | | can be used to measure the number of viable cells in | pancreatic, esophageal, stomach, brain, liver, and urinary |
| | | | | culture based on quantitation of the ATP present | cancer. Other preferred indications include benign |
| | | | | which signals the presence of metabolically active | dysproliferative disorders and pre-neoplastic conditions, |
| | | | | cells. 3T3-L1 is a mouse preadipocyte cell line. It is a | such as, for example, hyperplasia, metaplasia, and/or |
| | | | | continuous substrain of 3T3 fibroblast cells developed | dysplasia. |
| | | | | through clonal isolation. Cells were differentiated to | |
| | | | | an adipose-like state before being used in the screen. | |
| | | | | See Green H and Meuth M., Cell 3: 127-133 (1974), | |
| | | | | which is herein incorporated by reference in its | |
| | | | | entirety. | |
| 53 | HHA1S21 | 256 | Analysis of viability and/or | Assays for the regulation (i.e. increases or | Highly preferred indications include neoplastic diseases |
| | | | proliferation of OE33 esophageal | decreases) of viability and proliferation of cells in | (e.g. cancer) such as described herein under the heading |
| | | | tumor cells. | vitro are well-known in the art and may be used or | “Hyperproliferative Disorders” (particularly including, but |
| | | | | routinely modified to assess the ability of | not limited to, cancer involving cells of the esophageal |
| | | | | polypeptides of the invention (including antibodies | and/or the gastrointestinal tract). Highly preferred |
| | | | | and agonists or antagonists of the invention) to | embodiments of the invention include methods of |
| | | | | regulate viability and proliferation of tumor cells and | preventing, detecting, diagnosing, treating and/or |
| | | | | cell lines. For example, the CellTiter-Glo ™ | ameliorating cancer and hyperproliferative disorders |
| | | | | Luminescent Cell Viability Assay (Promega Corp., | involving the gastrointestinal tract, particularly the |
| | | | | Madison, WI, USA) can be used to measure the | esophagous. |
| | | | | number of viable cells in culture based on quantitation | Another highly preferred indication includes |
| | | | | of the ATP present which signals the presence of | gastroesophageal reflux. Highly preferred embodiments of |
| | | | | metabolically active cells. Inappropriate proliferation | the invention include methods of preventing, detecting, |
| | | | | of cancer cells is a hallmark of cancer development | diagnosing, treating and/or ameliorating gastroesophageal |
| | | | | and progression, and it is of therapeutic interest to | reflux. |
| | | | | identify factors that can affect tumor cell proliferation. | |
| | | | | This assay is used to identify agents that affect OE33 | |
| | | | | viability or proliferation. OE33 is a human Barrett's- | |
| | | | | derived adenocarcinoma esophageal carcinoma cell | |
| | | | | line. To enhance the sensitivity, assays were run in | |
| | | | | combination with camptothecin a chemotherapeutic | |
| | | | | agent in use in clinical cancer therapy. | |
| | | | | Literature using OE33 cells in similar type assays: | |
| | | | | Kim A H, Lebman D A, Dietz C M, Snyder S R, Eley | |
| | | | | K W, Chung T D Transforming growth factor-beta is | |
| | | | | an endogenous radioresistance factor in the | |
| | | | | esophageal adenocarcinoma cell line OE-33. Int J | |
| | | | | Oncol. 2003 Dec; 23(6): 1593-9; and | |
| | | | | Haigh C R, Attwood S E, Thompson D G, Jankowski | |
| | | | | J A, Kirton C M, Pritchard D M, Varro A, Dimaline R. | |
| | | | | Gastrin induces proliferation in Barrett's metaplasia | |
| | | | | through activation of the CCK2 receptor. | |
| | | | | Gastroenterology. 2003 Mar; 124(3): 615-25; both of | |
| | | | | which are incorporated by reference in their entireties. | |
| 54 | HHMQL78 | 257 | Activation of transcription through | Assays for the activation of transcription through the | A highly preferred indication is diabetes. Additional highly |
| | | | cAMP response element (CRE) in | cAMP response element are well-known in the art and | preferred indications include complications associated with |
| | | | HIB-1B preadipocyte. | may be used or routinely modified to assess the ability | diabetes (e.g., diabetic retinopathy, diabetic nephropathy, |
| | | | | of polypeptides of the invention (including antibodies | kidney disease (e.g., renal failure, nephropathy and/or other |
| | | | | and agonists or antagonists of the invention) to | diseases and disorders as described in the “Renal Disorders” |
| | | | | increase cAMP, regulate CREB transcription factors, | section below), diabetic neuropathy, nerve disease and |
| | | | | and modulate expression of genes involved in a wide | nerve damage (e.g., due to diabetic neuropathy), blood |
| | | | | variety of cell functions. For example, a HIB/CRE | vessel blockage, heart disease, stroke, impotence (e.g., due |
| | | | | reporter assay may be used to identify factors that | to diabetic neuropathy or blood vessel blockage), seizures, |
| | | | | activate the cAMP signaling pathway. CRE (cAMP | mental confusion, drowsiness, nonketotic hyperglycemic- |
| | | | | response element) is the binding site for CREB (CRE | hyperosmolar coma, cardiovascular disease (e.g., heart |
| | | | | binding protein) transcription factor, which is | disease, atherosclerosis, microvascular disease, |
| | | | | stimulated by increases in cAMP level (for example, | hypertension, stroke, and other diseases and disorders as |
| | | | | as a result of G-protein coupled receptors | described in the “Cardiovascular Disorders” section below), |
| | | | | engagement). CRE activation leads to expression of | dyslipidemia, endocrine disorders (as described in the |
| | | | | genes involved in diverse cellular responses, including | “Endocrine Disorders” section below), neuropathy, vision |
| | | | | intermediary metabolism, neuronal signaling, cell | impairment (e.g., diabetic retinopathy and blindness), ulcers |
| | | | | proliferation and apoptosis. cAMP is the major | and impaired wound healing, and infection (e.g., infectious |
| | | | | regulator of lipolysis in adipocytes, and is involved in | diseases and disorders as described in the “Infectious |
| | | | | differentiation of preadipocytes. Exemplary assays | Diseases” section below, especially of the urinary tract and |
| | | | | for transcription through the cAMP response element | skin). Highly preferred indications also include obesity, |
| | | | | that may be used or routinely modified to test cAMP- | weight gain, and weight loss, as well as complications |
| | | | | response element activity of polypeptides of the | associated with obesity, weight gain, and weight loss. |
| | | | | invention (including antibodies and agonists or | Preferred embodiments of the invention include methods of |
| | | | | antagonists of the invention) include assays disclosed | preventing, detecting, diagnosing, treating and/or |
| | | | | in Berger et al., Gene 66: 1-10 (1998); Cullen and | ameliorating the above mentioned conditions, disorders, |
| | | | | Malm, Methods in Enzymol 216: 362-368 (1992); | and diseases. |
| | | | | Henthorn et al., Proc Natl Acad Sci USA 85: 6342- | |
| | | | | 6346 (1988); Reusch et al., Mol Cell Biol 20(3): 1008- | |
| | | | | 1020 (2000); and Klemm et al., J Biol Chem 273: 917- | |
| | | | | 923 (1998), the contents of each of which are herein | |
| | | | | incorporated by reference in its entirety. HIB-1B is a | |
| | | | | preadipocyte cell line derived from mouse brown fat | |
| | | | | tissue (Proc Natl Acad Sci USA 89: 7561-7565, 1992). | |
| | | | | The cell line is commonly used as a model system for | |
| | | | | the study of brown fat tissue cellular physiology | |
| | | | | (Klaus et al., J Cell Sci 107: 313-319, 1994). | |
| 58 | HHMSF21 | 261 | Activation of transcription through | Assays for the activation of transcription through the | A highly preferred indication is diabetes. Additional highly |
| | | | cAMP response element (CRE) in | cAMP response element are well-known in the art and | preferred indications include complications associated with |
| | | | HIB-1B preadipocyte. | may be used or routinely modified to assess the ability | diabetes (e.g., diabetic retinopathy, diabetic nephropathy, |
| | | | | of polypeptides of the invention (including antibodies | kidney disease (e.g., renal failure, nephropathy and/or other |
| | | | | and agonists or antagonists of the invention) to | diseases and disorders as described in the “Renal Disorders” |
| | | | | increase cAMP, regulate CREB transcription factors, | section below), diabetic neuropathy, nerve disease and |
| | | | | and modulate expression of genes involved in a wide | nerve damage (e.g., due to diabetic neuropathy), blood |
| | | | | variety of cell functions. For example, a HIB/CRE | vessel blockage, heart disease, stroke, impotence (e.g., due |
| | | | | reporter assay may be used to identify factors that | to diabetic neuropathy or blood vessel blockage), seizures, |
| | | | | activate the cAMP signaling pathway. CRE (cAMP | mental confusion, drowsiness, nonketotic hyperglycemic- |
| | | | | response element) is the binding site for CREB (CRE | hyperosmolar coma, cardiovascular disease (e.g., heart |
| | | | | binding protein) transcription factor, which is | disease, atherosclerosis, microvascular disease, |
| | | | | stimulated by increases in cAMP level (for example, | hypertension, stroke, and other diseases and disorders as |
| | | | | as a result of G-protein coupled receptors | described in the “Cardiovascular Disorders” section below), |
| | | | | engagement). CRE activation leads to expression of | dyslipidemia, endocrine disorders (as described in the |
| | | | | genes involved in diverse cellular responses, including | “Endocrine Disorders” section below), neuropathy, vision |
| | | | | intermediary metabolism, neuronal signaling, cell | impairment (e.g., diabetic retinopathy and blindness), ulcers |
| | | | | proliferation and apoptosis. cAMP is the major | and impaired wound healing, and infection (e.g., infectious |
| | | | | regulator of lipolysis in adipocytes, and is involved in | diseases and disorders as described in the “Infectious |
| | | | | differentiation of preadipocytes. Exemplary assays | Diseases” section below, especially of the urinary tract and |
| | | | | for transcription through the cAMP response element | skin). Highly preferred indications also include obesity, |
| | | | | that may be used or routinely modified to test cAMP- | weight gain, and weight loss, as well as complications |
| | | | | response element activity of polypeptides of the | associated with obesity, weight gain, and weight loss. |
| | | | | invention (including antibodies and agonists or | Preferred embodiments of the invention include methods of |
| | | | | antagonists of the invention) include assays disclosed | preventing, detecting, diagnosing, treating and/or |
| | | | | in Berger et al., Gene 66: 1-10 (1998); Cullen and | ameliorating the above mentioned conditions, disorders, |
| | | | | Malm, Methods in Enzymol 216: 362-368 (1992); | and diseases. |
| | | | | Henthorn et al., Proc Natl Acad Sci USA 85: 6342- | |
| | | | | 6346 (1988); Reusch et al., Mol Cell Biol 20(3): 1008- | |
| | | | | 1020 (2000); and Klemm et al., J Biol Chem 273: 917- | |
| | | | | 923 (1998), the contents of each of which are herein | |
| | | | | incorporated by reference in its entirety. HIB-1B is a | |
| | | | | preadipocyte cell line derived from mouse brown fat | |
| | | | | tissue (Proc Natl Acad Sci USA 89: 7561-7565, 1992). | |
| | | | | The cell line is commonly used as a model system for | |
| | | | | the study of brown fat tissue cellular physiology | |
| | | | | (Klaus et al., J Cell Sci 107: 313-319, 1994). | |
| 58 | HHMSF21 | 261 | IL2 production by primary human T- | T Cell CoStimulatory Assay: 293T epithelial cells (a | A highly preferred embodiment of the invention includes |
| | | | cells determined after coculture | highly transfectable derivative of the 293 cell line into | a method for inhibiting (e.g., reducing) IL-2 production. |
| | | | with SID transfected 293T | which the temperature sensitive gene for SV40 T- | Another highly preferred embodiment of the invention |
| | | | epithelial cells | antigen was inserted) are transfected with SID | includes a method for inhibiting T cell expansion and/or |
| | | | | construct DNA. Cells are cultured for 24 hours, then | a method for inhibiting T cell differentiation. In a |
| | | | | irradiated 20 min to inhibit their proliferation. | specific embodiment, this method inhibits the |
| | | | | Primary T cells are then added and cells are | differentiation of T cells into effector cells. |
| | | | | cocultured for 48 hours. Conditioned media is | Highly preferred indications include eosinophilia, asthma, |
| | | | | collected and analyzed for IL2 protein production | allergy, hypersensitivity reactions, inflammation, and |
| | | | | using FMAT. This protocol will allow detection of | inflammatory disorders. Additional highly preferred |
| | | | | activity of either secreted or membrane bound SID | indications include suppression of immune reactions to |
| | | | | clones that can enhance or repress T cell cytokine | transplanted organs and/or tissues, eg, graft v. host disease, |
| | | | | secretion. | uveitis, psoriasis, and tropical spastic paraparesis, as well as |
| | | | | is IL2 is a glycoprotein secreted by T lymphocytes | autoimmune diseases (e.g., rheumatoid arthritis, systemic |
| | | | | and other cells following activation by antigens, | lupus erythematosis, Crohn″s disease, multiple sclerosis |
| | | | | mitogens and other cytokines. It stimulates the | and/or as described below), Highly preferred indications |
| | | | | proliferation and cytotoxicity of T lymphocytes. It | also include inhibiting immune cell proliferation. |
| | | | | also enhances the microbicidal and cytotoxic activities | A highly preferred embodiment of the invention includes a |
| | | | | of NK cells, B lymphocytes, macrophages and | method for stimulating IL-2 production. A highly |
| | | | | monocytes. | preferred embodiment of the invention includes a method |
| | | | | Literature using similar methods to examine | for stimulating T cell expansion. A highly preferred |
| | | | | regulation of T cell IL2 production: | embodiment of the invention includes a method for |
| | | | | Labuda T, Wendt J, Hedlund G, Dohlsten M. ICAM- | stimulating T cell differentiation. In a specific embodiment, |
| | | | | 1 costimulation induces IL-2 but inhibits IL-10 | this method stimulates T cell differentiation into effector |
| | | | | production in superantigen-activated human CD4+ T | cells. Additional highly preferred indications include |
| | | | | cells. Immunology 1998 Aug; 94(4): 496-502; and | immune disorders (e.g., as described below under “Immune |
| | | | | Powell J D, Ragheb J A, Kitagawa-Sakakida S, | Activity”) immunodeficiencies (e.g., as described below). |
| | | | | Schwartz R H. Molecular regulation of interleukin-2 | Highly preferred indications also include boosting immune |
| | | | | expression by CD28 co-stimulation and anergy. | cell proliferation. Preferred indications include neoplastic |
| | | | | Immunol Rev 1998 Oct; 165: 287-300, the contents of | diseases (e.g., leukemia, lymphoma, and/or as described |
| | | | | which are both incorporated by reference herein. | below under “Hyperproliferative Disorders”, “Blood- |
| | | | | | Related Disorders”, and/or “Cardiovascular Disorders”). |
| 60 | HH1MU43 | 263 | IgG production by primary human B | B Cell CoStimulatory Assay: 293T epithelial cells (a | A highly preferred embodiment of the invention includes |
| | | | cells is determined after coculture | highly transfectable derivative of the 293 cell line into | a method for inhibiting (e.g., reducing) antibody (in |
| | | | with transfected 293T cells in | which the temperature sensitive gene for SV40 T- | particular, IgG) production. Highly preferred indications |
| | | | the presence of Staphylococcus | antigen was inserted) are transfected with SID | include eosinophilia, asthma, allergy, hypersensitivity |
| | | | aureus Cowan I (SAC). | construct DNA. Cells are cultured for 24 hours, then | reactions, inflammation, and inflammatory disorders. |
| | | | | irradiated 20 min to inhibit their proliferation. | Additional highly preferred indications include |
| | | | | Primary B cells are then added and cells are | autoimmune diseases (e.g., rheumatoid arthritis, |
| | | | | cocultured in the presence or absence of | systemic lupus erythematosis, Crohn″s disease, multiple |
| | | | | Staphylococcus aureus Cowan 1 (SAC), a B cell | sclerosis and/or as described below). Highly preferred |
| | | | | costimulator, for 96 hours. Conditioned media is | indications also include inhibiting immune cell |
| | | | | collected and analyzed for IgG using FMAT. This | proliferation, such as suppressing a B-cell-mediated |
| | | | | protocol will allow detection of activity of either | immune response. . |
| | | | | secreted or membrane bound SID clones that can | A highly preferred embodiment of the invention also |
| | | | | enhance or repress B cell IgG secretion. Secreted IgG | includes a method for stimulating antibody (in particular, |
| | | | | molecules serve as effectors of humoral immunity by | IgG) production. Highly preferred indications also include |
| | | | | neutralizing antigens. | boosting immune cell proliferation such as boosting a B- |
| | | | | | cell mediated immune response, immune disorders (e.g., as |
| | | | | | described below under “Immune Activity”), infection (e.g., |
| | | | | | an infectious disease as described below under “Infectious |
| | | | | | Disease”), immunodeficiencies (e.g., as described below). |
| | | | | | Preferred indications include neoplastic diseases (e.g., |
| | | | | | leukemia, lymphoma, and/or as described below under |
| | | | | | “Hyperproliferative Disorders”). |
| 65 | HDMSA08 | 268 | SEAP in HepG2/Squale-synthetase | Reporter Assay: construct contains regulatory and | A highly preferred indication is diabetes. Additional highly |
| | | | (stimulation) | coding sequence of squalene synthase, the first | preferred indications include complications associated with |
| | | | | specific enzyme in the cholesterol biosynthetic | diabetes (e.g., diabetic retinopathy, diabetic nephropathy, |
| | | | | pathway (G. Jiang, T. L. McKenzie, D. G. Conrad, | kidney disease (e.g., renal failure, nephropathy and/or other |
| | | | | and I. Shechter, Transcriptional Regulation by | diseases and disorders as described in the “Renal Disorders” |
| | | | | Lovastatin and 25-Hydroxycholesterol | section below), diabetic neuropathy, nerve disease and |
| | | | | in HepG2 Cells and Molecular Cloning and | nerve damage (e.g., due to diabetic neuropathy), blood |
| | | | | Expression of the cDNA for the Human Hepatic | vessel blockage, heart disease, stroke, impotence (e.g., due |
| | | | | Squalene Synthase. J. Biol. Chem. 268: 12818-12824, | to diabetic neuropathy or blood vessel blockage), seizures, |
| | | | | 1993). Cells were treated with transfected | mental confusion, drowsiness, nonketotic hyperglycemic- |
| | | | | supernatants, and SEAP activity was measured after | hyperosmolar coma, cardiovascular disease (e.g., heart |
| | | | | 72 hours. HepG2 is a human hepatocellular | disease, atherosclerosis, microvascular disease, |
| | | | | carcinoma cell line (ATCC HB-8065). Knowles B B, | hypertension, stroke, and other diseases and disorders as |
| | | | | Howe C C, Aden D P. Human hepatocellular | described in the “Cardiovascular Disorders” section below), |
| | | | | carcinoma cell lines secrete the major plasma proteins | dyslipidemia, endocrine disorders (as described in the |
| | | | | and hepatitis B surface antigen. Science. 209: 497-9, | “Endocrine Disorders” section below), neuropathy, vision |
| | | | | 1980, the contents of the above are herein | impairment (e.g., diabetic retinopathy and blindness), ulcers |
| | | | | incorporated by reference in their entirety. | and impaired wound healing, and infection (e.g., infectious |
| | | | | | diseases and disorders as described in the “Infectious |
| | | | | | Diseases” section below, especially of the urinary tract and |
| | | | | | skin). Highly preferred indications also include obesity, |
| | | | | | weight gain, and weight loss, as well as complications |
| | | | | | associated with obesity, weight gain, and weight loss. |
| | | | | | Preferred embodiments of the invention include methods of |
| | | | | | preventing, detecting, diagnosing, treating and/or |
| | | | | | ameliorating the above mentioned conditions, disorders, |
| | | | | | and diseases. |
| 65 | HDMSA08 | 268 | Analysis of viability and/or | Assays for the regulation (i.e. increases or decreases) | Highly preferred indications include neoplastic diseases |
| | | | proliferation of OE33 esophageal | of viability and proliferation of cells in vitro are well- | (e.g. cancer) such as described herein under the heading |
| | | | tumor cells. | known in the art and may be used or routinely | “Hyperproliferative Disorders” (particularly including, but |
| | | | | modified to assess the ability of polypeptides of the | not limited to, cancer involving cells of the esophageal |
| | | | | invention (including antibodies and agonists or | and/or the gastrointestinal tract). Highly preferred |
| | | | | antagonists of the invention) to regulate viability and | embodiments of the invention include methods of |
| | | | | proliferation of tumor cells and cell lines. For | preventing, detecting, diagnosing, treating and/or |
| | | | | example, the CellTiter-Glo ™ Luminescent Cell | ameliorating cancer and hyperproliferative disorders |
| | | | | Viability Assay (Promega Corp., Madison, WI, USA) | involving the gastrointestinal tract, particularly the |
| | | | | can be used to measure the number of viable cells in | esophagous. |
| | | | | culture based on quantitation of the ATP present | Another highly preferred indication includes |
| | | | | which signals the presence of metabolically active | gastroesophageal reflux. Highly preferred embodiments of |
| | | | | cells. Inappropriate proliferation of cancer cells is a | the invention include methods of preventing, detecting, |
| | | | | hallmark of cancer development and progression, and | diagnosing, treating and/or ameliorating gastroesophageal |
| | | | | it is of therapeutic interest to identify factors that can | reflux. |
| | | | | affect tumor cell proliferation. This assay is used to | |
| | | | | identify agents that affect OE33 viability or | |
| | | | | proliferation. OE33 is a human Barrett's-derived | |
| | | | | adenocarcinoma esophageal carcinoma cell line. To | |
| | | | | enhance the sensitivity, assays were run in | |
| | | | | combination with camptothecin a chemotherapeutic | |
| | | | | agent in use in clinical cancer therapy. | |
| | | | | Literature using OE33 cells in similar type assays: | |
| | | | | Kim A H, Lebman D A, Dietz C M, Snyder S R, Eley | |
| | | | | K W, Chung T D Transforming growth factor-beta is | |
| | | | | an endogenous radioresistance factor in the | |
| | | | | esophageal adenocarcinoma cell line OE-33. Int J | |
| | | | | Oncol. 2003 Dec; 23(6): 1593-9; and | |
| | | | | Haigh C R, Attwood S E, Thompson D G, Jankowski | |
| | | | | J A, Kirton C M, Pritchard D M, Varro A, Dimaline R. | |
| | | | | Gastrin induces proliferation in Barren's metaplasia | |
| | | | | through activation of the CCK2 receptor. | |
| | | | | Gastroenterology. 2003 Mar; 124(3): 615-25; both of | |
| | | | | which are incorporated by reference in their entireties. | |
| 66 | HCPBA16 | 269 | Analysis of viability and/or | Assays for the regulation (i.e. increases or decreases) | Highly preferred indications include neoplastic diseases |
| | | | proliferation of OE33 esophageal | of viability and proliferation of cells in vitro are well- | (e.g. cancer) such as described herein under the heading |
| | | | tumor cells. | known in the art and may be used or routinely | “Hyperproliferative Disorders” (particularly including, but |
| | | | | modified to assess the ability of polypeptides of the | not limited to, cancer involving cells of the esophageal |
| | | | | invention (including antibodies and agonists or | and/or the gastrointestinal tract). Highly preferred |
| | | | | antagonists of the invention) to regulate viability and | embodiments of the invention include methods of |
| | | | | proliferation of tumor cells and cell lines. For | preventing, detecting, diagnosing, treating and/or |
| | | | | example, the CellTiter-Glo ™ Luminescent Cell | ameliorating cancer and hyperproliferative disorders |
| | | | | Viability Assay (Promega Corp., Madison, WI, USA) | involving the gastrointestinal tract, particularly the |
| | | | | can be used to measure the number of viable cells in | esophagous. |
| | | | | culture based on quantitation of the ATP present | Another highly preferred indication includes |
| | | | | which signals the presence of metabolically active | gastroesophageal reflux. Highly preferred embodiments of |
| | | | | cells. Inappropriate proliferation of cancer cells is a | the invention include methods of preventing, detecting, |
| | | | | hallmark of cancer development and progression, and | diagnosing, treating and/or ameliorating gastroesophageal |
| | | | | it is of therapeutic interest to identify factors that can | reflux. |
| | | | | affect tumor cell proliferation. This assay is used to | |
| | | | | identify agents that affect OE33 viability or | |
| | | | | proliferation. OE33 is a human Barrett's-derived | |
| | | | | adenocarcinoma esophageal carcinoma cell line. To | |
| | | | | enhance the sensitivity, assays were run in | |
| | | | | combination with camptothecin a chemotherapeutic | |
| | | | | agent in use in clinical cancer therapy. | |
| | | | | Literature using OE33 cells in similar type assays: | |
| | | | | Kim A H, Lebman D A, Dietz C M, Snyder S R, Eley | |
| | | | | K W, Chung T D Transforming growth factor-beta is | |
| | | | | an endogenous radioresistance factor in the | |
| | | | | esophageal adenocarcinoma cell line OE-33. Int J | |
| | | | | Oncol. 2003 Dec; 23(6): 1593-9; and | |
| | | | | Haigh C R, Attwood S E, Thompson D G, Jankowski | |
| | | | | J A, Kirton C M, Pritchard D M, Varro A, Dimaline R. | |
| | | | | Gastrin induces proliferation in Barren's metaplasia | |
| | | | | through activation of the CCK2 receptor. | |
| | | | | Gastroenterology. 2003 Mar; 124(3): 615-25; both of | |
| | | | | which are incorporated by reference in their entireties. | |
| 67 | HCPBM77 | 270 | SEAP in HepG2/Squale-synthetase | Reporter Assay: construct contains regulatory and | A highly preferred indication is diabetes. Additional highly |
| | | | (stimulation) | coding sequence of squalene synthase, the first | preferred indications include complications associated with |
| | | | | specific enzyme in the cholesterol biosynthetic | diabetes (e.g., diabetic retinopathy, diabetic nephropathy, |
| | | | | pathway (G. Jiang, T. L. McKenzie, D. G. Conrad, | kidney disease (e.g., renal failure, nephropathy and/or other |
| | | | | and I. Shechter, Transcriptional Regulation by | diseases and disorders as described in the “Renal Disorders” |
| | | | | Lovastatin and 25-Hydroxycholesterol | section below), diabetic neuropathy, nerve disease and |
| | | | | in HepG2 Cells and Molecular Cloning and | nerve damage (e.g., due to diabetic neuropathy), blood |
| | | | | Expression of the cDNA for the Human Hepatic | vessel blockage, heart disease, stroke, impotence (e.g., due |
| | | | | Squalene Synthase. J. Biol. Chem. 268: 12818-12824, | to diabetic neuropathy or blood vessel blockage), seizures, |
| | | | | 1993). Cells were treated with transfected | mental confusion, drowsiness, nonketotic hyperglycemic- |
| | | | | supernatants, and SEAP activity was measured after | hyperosmolar coma, cardiovascular disease (e.g., heart |
| | | | | 72 hours. HepG2 is a human hepatocellular | disease, atherosclerosis, microvascular disease, |
| | | | | carcinoma cell line (ATCC HB-8065). Knowles B B, | hypertension, stroke, and other diseases and disorders as |
| | | | | Howe C C, Aden D P. Human hepatocellular | described in the “Cardiovascular Disorders” section below), |
| | | | | carcinoma cell lines secrete the major plasma proteins | dyslipidemia, endocrine disorders (as described in the |
| | | | | and hepatitis B surface antigen. Science. 209: 497-9, | “Endocrine Disorders” section below), neuropathy, vision |
| | | | | 1980, the contents of the above are herein | impairment (e.g., diabetic retinopathy and blindness), ulcers |
| | | | | incorporated by reference in their entirety. | and impaired wound healing, and infection (e.g., infectious |
| | | | | | diseases and disorders as described in the “Infectious |
| | | | | | Diseases” section below, especially of the urinary tract and |
| | | | | | skin). Highly preferred indications also include obesity, |
| | | | | | weight gain, and weight loss, as well as complications |
| | | | | | associated with obesity, weight gain, and weight loss. |
| | | | | | Preferred embodiments of the invention include methods of |
| | | | | | preventing, detecting, diagnosing, treating and/or |
| | | | | | ameliorating the above mentioned conditions, disorders, |
| | | | | | and diseases. |
| 68 | HCPBR37 | 271 | SEAP in HepG2/Squale-synthetase | Reporter Assay: construct contains regulatory and | A highly preferred indication is diabetes. Additional highly |
| | | | (stimulation) | coding sequence of squalene synthase, the first | preferred indications include complications associated with |
| | | | | specific enzyme in the cholesterol biosynthetic | diabetes (e.g., diabetic retinopathy, diabetic nephropathy, |
| | | | | pathway (G. Jiang, T. L. McKenzie, D. G. Conrad, | kidney disease (e.g., renal failure, nephropathy and/or other |
| | | | | and I. Shechter, Transcriptional Regulation by | diseases and disorders as described in the “Renal Disorders” |
| | | | | Lovastatin and 25-Hydroxycholesterol | section below), diabetic neuropathy, nerve disease and |
| | | | | in HepG2 Cells and Molecular Cloning and | nerve damage (e.g., due to diabetic neuropathy), blood |
| | | | | Expression of the cDNA for the Human Hepatic | vessel blockage, heart disease, stroke, impotence (e.g., due |
| | | | | Squalene Synthase. J. Biol. Chem. 268: 12818-12824, | to diabetic neuropathy or blood vessel blockage), seizures, |
| | | | | 1993). Cells were treated with transfected | mental confusion, drowsiness, nonketotic hyperglycemic- |
| | | | | supernatants, and SEAP activity was measured after | hyperosmolar coma, cardiovascular disease (e.g., heart |
| | | | | 72 hours. HepG2 is a human hepatocellular | disease, atherosclerosis, microvascular disease, |
| | | | | carcinoma cell line (ATCC HB-8065). Knowles B B, | hypertension, stroke, and other diseases and disorders as |
| | | | | Howe C C, Aden D P. Human hepatocellular | described in the “Cardiovascular Disorders” section below), |
| | | | | carcinoma cell lines secrete the major plasma proteins | dyslipidemia, endocrine disorders (as described in the |
| | | | | and hepatitis B surface antigen. Science. 209: 497-9, | “Endocrine Disorders” section below), neuropathy, vision |
| | | | | 1980, the contents of the above are herein | impairment (e.g., diabetic retinopathy and blindness), ulcers |
| | | | | incorporated by reference in their entirety. | and impaired wound healing, and infection (e.g., infectious |
| | | | | | diseases and disorders as described in the “Infectious |
| | | | | | Diseases” section below, especially of the urinary tract and |
| | | | | | skin). Highly preferred indications also include obesity, |
| | | | | | weight gain, and weight loss, as well as complications |
| | | | | | associated with obesity, weight gain, and weight loss. |
| | | | | | Preferred embodiments of the invention include methods of |
| | | | | | preventing, detecting, diagnosing, treating and/or |
| | | | | | ameliorating the above mentioned conditions, disorders, |
| | | | | | and diseases. |
| 69 | HIEAG70 | 272 | Analysis of viability and/or | Assays for the regulation (i.e. increases or | Highly preferred indications include neoplastic diseases |
| | | | proliferation of OE33 esophageal | decreases) of viability and proliferation of cells in | (e.g. cancer) such as described herein under the heading |
| | | | tumor cells. | vitro are well-known in the art and may be used or | “Hyperproliferative Disorders” (particularly including, but |
| | | | | routinely modified to assess the ability of | not limited to, cancer involving cells of the esophageal |
| | | | | polypeptides of the invention (including antibodies | and/or the gastrointestinal tract). Highly preferred |
| | | | | and agonists or antagonists of the invention) to | embodiments of the invention include methods of |
| | | | | regulate viability and proliferation of tumor cells and | preventing, detecting, diagnosing, treating and/or |
| | | | | cell lines. For example, the CellTiter-Glo ™ | ameliorating cancer and hyperproliferative disorders |
| | | | | Luminescent Cell Viability Assay (Promega Corp., | involving the gastrointestinal tract, particularly the |
| | | | | Madison, WI, USA) can be used to measure the | esophagous. |
| | | | | number of viable cells in culture based on quantitation | Another highly preferred indication includes |
| | | | | of the ATP present which signals the presence of | gastroesophageal reflux. Highly preferred embodiments of |
| | | | | metabolically active cells. Inappropriate proliferation | the invention include methods of preventing, detecting, |
| | | | | of cancer cells is a hallmark of cancer development | diagnosing, treating and/or ameliorating gastroesophageal |
| | | | | and progression, and it is of therapeutic interest to | reflux. |
| | | | | identify factors that can affect tumor cell proliferation. | |
| | | | | This assay is used to identify agents that affect OE33 | |
| | | | | viability or proliferation. OE33 is a human Barrett's- | |
| | | | | derived adenocarcinoma esophageal carcinoma cell | |
| | | | | line. To enhance the sensitivity, assays were run in | |
| | | | | combination with camptothecin a chemotherapeutic | |
| | | | | agent in use in clinical cancer therapy. | |
| | | | | Literature using OE33 cells in similar type assays: | |
| | | | | Kim A H, Lebman D A, Dietz C M, Snyder S R, Eley | |
| | | | | K W, Chung T D Transforming growth factor-beta is | |
| | | | | an endogenous radioresistance factor in the | |
| | | | | esophageal adenocarcinoma cell line OE-33. Int J | |
| | | | | Oncol. 2003 Dec; 23(6): 1593-9; and | |
| | | | | Haigh C R, Attwood S E, Thompson D G, Jankowski | |
| | | | | J A, Kitton C M, Pritchard D M, Varro A, Dimaline R. | |
| | | | | Gastrin induces proliferation in Barrett's metaplasia | |
| | | | | through activation of the CCK2 receptor. | |
| | | | | Gastroenterology. 2003 Mar; 124(3): 615-25; both of | |
| | | | | which are incorporated by reference in their entireties. | |
| 74 | HIGAN47 | 277 | Proliferation of pre-adipose cells | Assays for the regulation (i.e. increases or decreases) | Highly preferred indications include neoplastic diseases |
| | | | (such as 3T3-L1 cells) | of viability and proliferation of cells in vitro are well- | (e.g. cancer) such as described herein under the heading |
| | | | | known in the art and may be used or routinely | “Hyperproliferative Disorders”. Highly preferred |
| | | | | modified to assess the ability of polypeptides of the | embodiments of the invention include methods of |
| | | | | invention (including antibodies and agonists or | preventing, detecting, diagnosing, treating and/or |
| | | | | antagonists of the invention) to regulate viability and | ameliorating neoplasms and cancer, such as, but are not |
| | | | | proliferation of pre-adipose cells and cell lines. For | limited to, lipoma, liposarcoma, lymphoma, leukemia and |
| | | | | example, the CellTiter-Gloô Luminescent Cell | breast, colon, and kidney cancer. Additional highly |
| | | | | Viability Assay (Promega Corp., Madison, WI, USA) | preferred indications include melanoma, prostate, lung, |
| | | | | can be used to measure the number of viable cells in | pancreatic, esophageal, stomach, brain, liver, and urinary |
| | | | | culture based on quantitation of the ATP present | cancer. Other preferred indications include benign |
| | | | | which signals the presence of metabolically active | dysproliferative disorders and pre-neoplastic conditions, |
| | | | | cells. 3T3-L1 is a mouse preadipocyte cell line. It is a | such as, for example, hyperplasia, metaplasia, and/or |
| | | | | continuous substrain of 3T3 fibroblast cells developed | dysplasia. |
| | | | | through clonal isolation. Cells were differentiated to | |
| | | | | an adipose-like state before being used in the screen. | |
| | | | | See Green H and Meuth M, Cell 3: 127-133 (1974), | |
| | | | | which is herein incorporated by reference in its | |
| | | | | entirety. | |
| 80 | HCPCN28 | 283 | TNFa production by primary human T- | T Cell CoStimulatory Assays: 2B9 (stably expressing | Highly preferred indications include eosinophilia, asthma, |
| | | | cells determined after coculture | CD86, a T cell costimulator) epithelial cells are | allergy, hypersensitivity reactions, inflammation, and |
| | | | with a transfected 2B9 epithelial | transfected with the clone construct DNA of interest. | inflammatory disorders. An enhanced tumour-necrosis |
| | | | cells (with the gene of interest) | Cells are cultured for 24 hours, then irradiated 20 min | factor-alpha (TNF-alpha) synthesis is associated with the |
| | | | stably expressing CD86, a T cell | to inhibit their proliferation. Primary T cells are then | development of rheumatoid arthritis, psoriatic arthritis and |
| | | | costimulator. | added and cells are cocultured for 48 hours. | inflammatory bowel disease, thus, highly preferred |
| | | | | Conditioned media is collected and analyzed for | indications also include inhibiting (e.g., reducing TNFa |
| | | | | TNFa protein production using FMAT. This protocol | production. Additional highly preferred indications include |
| | | | | will allow detection of activity of either secreted or | immune disorders (e.g., as described below under “Immune |
| | | | | membrane bound clones that can enhance or repress T | Activity”), chronic inflammatory diseases, autoimmune |
| | | | | cell TNFa secretion. Tumor Necrosis Factor alpha | diseases (e.g., rheumatoid arthritis, systemic lupus |
| | | | | (TNFa) is a cytokine that exerts a wide range of | erythematosis, Crohn″s disease, multiple sclerosis and/or as |
| | | | | inflammatory and cytotoxic effects on a variety of | described below), immunodeficiencies (e.g., as described |
| | | | | cells. TNF is a major mediator of inflammation, viral | below). Preferred indications include neoplastic diseases |
| | | | | replication, tumor metastasis, transplant rejection, | (e.g., leukemia, lymphoma, and/or as described below |
| | | | | rheumatoid arthritis, and septic shock. | under “Hyperproliferative Disorders”). |
| | | | | Literature using similar methods to examine | |
| | | | | regulation of T cell TNFa production: | |
| | | | | Ariel A, Chiang N, Arita M, Petasis N A, Serhan C N. | |
| | | | | Aspirin-triggered lipoxin A4 and B4 analogs block | |
| | | | | extracellular signal-regulated kinase-dependent TNF- | |
| | | | | alpha secretion from human T cells. Immunol. 2003 | |
| | | | | Jun 15; 170(12): 6266-72; and | |
| | | | | Bleijs DA, de Waal-Malefyt R, Figdor C G, van | |
| | | | | Kooyk Y. Co-stimulation of T cells results in distinct | |
| | | | | IL-10 and TNF-alpha cytokine profiles dependent on | |
| | | | | binding to ICAM-1, ICAM-2 or ICAM-3. Eur J | |
| | | | | Immunol. 1999 Jul; 29(7): 2248-58; both of which are | |
| | | | | incorporated by reference in their entireties. | |
| 81 | HABCP53 | 284 | SEAP in HepG2/Squale-synthetase | Reporter Assay: construct contains regulatory and | A highly preferred indication is diabetes. Additional highly |
| | | | (stimulation) | coding sequence of squalene synthase, the first | preferred indications include complications associated with |
| | | | | specific enzyme in the cholesterol biosynthetic | diabetes (e.g., diabetic retinopathy, diabetic nephropathy, |
| | | | | pathway (G. Jiang, T. L. McKenzie, D. G. Conrad, | kidney disease (e.g., renal failure, nephropathy and/or other |
| | | | | and I. Shechter. Transcriptional Regulation by | diseases and disorders as described in the “Renal Disorders” |
| | | | | Lovastatin and 25-Hydroxycholesterol | section below), diabetic neuropathy, nerve disease and |
| | | | | in HepG2 Cells and Molecular Cloning and | nerve damage (e.g., due to diabetic neuropathy), blood |
| | | | | Expression of the cDNA for the Human Hepatic | vessel blockage, heart disease, stroke, impotence (e.g., due |
| | | | | Squalene Synthase. J. Biol. Chem. 268: 12818-12824, | to diabetic neuropathy or blood vessel blockage), seizures, |
| | | | | 1993). Cells were treated with SID | mental confusion, drowsiness, nonketotic hyperglycemic- |
| | | | | supernatants, and SEAP activity was measured after | hyperosmolar coma, cardiovascular disease (e.g., heart |
| | | | | 72 hours. HepG2 is a human hepatocellular | disease, atherosclerosis, microvascular disease, |
| | | | | carcinoma cell line (ATCC HB-8065). Knowles B B, | hypertension, stroke, and other diseases and disorders as |
| | | | | Howe C C, Aden D P. Human hepatocellular | described in the “Cardiovascular Disorders” section below), |
| | | | | carcinoma cell lines secrete the major plasma proteins | dyslipidemia, endocrine disorders (as described in the |
| | | | | and hepatitis B surface antigen. Science. 209: 497-9, | “Endocrine Disorders” section below), neuropathy, vision |
| | | | | 1980, the contents of which are herein incorporated | impairment (e.g., diabetic retinopathy and blindness), ulcers |
| | | | | by reference in its entirety. | and impaired wound healing, and infection (e.g., infectious |
| | | | | | diseases and disorders as described in the “Infectious |
| | | | | | Diseases” section below, especially of the urinary tract and |
| | | | | | skin). Highly preferred indications also include obesity, |
| | | | | | weight gain, and weight loss, as well as complications |
| | | | | | associated with obesity, weight gain, and weight loss. |
| | | | | | Preferred embodiments of the invention include methods of |
| | | | | | preventing, detecting, diagnosing, treating and/or |
| | | | | | ameliorating the above mentioned conditions, disorders, |
| | | | | | and diseases. |
| 81 | HABCP53 | 284 | Analysis of viability and/or | Assays for the regulation (i.e. increases or | Highly preferred indications include neoplastic diseases |
| | | | proliferation of OE33 | decreases) of viability and proliferation of cells in | (e.g. cancer) such as described herein under the heading |
| | | | esophageal tumor cells. | vitro are well-known in the art and may be used or | “Hyperproliferative Disorders” (particularly including, but |
| | | | | routinely modified to assess the ability of | not limited to, cancer involving cells of the esophageal |
| | | | | polypeptides of the invention (including antibodies | and/or the gastrointestinal tract). Highly preferred |
| | | | | and agonists or antagonists of the invention) to | embodiments of the invention include methods of |
| | | | | regulate viability and proliferation of tumor cells and | preventing, detecting, diagnosing, treating and/or |
| | | | | cell lines. For example, the CellTiter-Glo ™ | ameliorating cancer and hyperproliferative disorders |
| | | | | Luminescent Cell Viability Assay (Promega Corp., | involving the gastrointestinal tract, particularly the |
| | | | | Madison, WI, USA) can be used to measure the | esophagous. |
| | | | | number of viable cells in culture based on quantitation | Another highly preferred indication includes |
| | | | | of the ATP present which signals the presence of | gastroesophageal reflux. Highly preferred embodiments of |
| | | | | metabolically active cells. Inappropriate proliferation | the invention include methods of preventing, detecting, |
| | | | | of cancer cells is a hallmark of cancer development | diagnosing, treating and/or ameliorating gastroesophageal |
| | | | | and progression, and it is of therapeutic interest to | reflux. |
| | | | | identify factors that can affect tumor cell proliferation. | |
| | | | | This assay is used to identify agents that affect OE33 | |
| | | | | viability or proliferation. OE33 is a human Barrett's- | |
| | | | | derived adenocarcinoma esophageal carcinoma cell | |
| | | | | line. To enhance the sensitivity, assays were run in | |
| | | | | combination with camptothecin a chemotherapeutic | |
| | | | | agent in use in clinical cancer therapy. | |
| | | | | Literature using OE33 cells in similar type assays: | |
| | | | | Kim A H, Lebman D A, Dietz C M, Snyder S R, Eley | |
| | | | | K W, Chung T D Transforming growth factor-beta is | |
| | | | | an endogenous radioresistance factor in the | |
| | | | | esophageal adenocarcinoma cell line OE-33. Int J | |
| | | | | Oncol. 2003 Dec; 23(6): 1593-9; and | |
| | | | | Haigh C R, Attwood S E, Thompson D G, Jankowski | |
| | | | | J A, Kirton C M, Pritchard D M, Varro A, Dimaline R. | |
| | | | | Gastrin induces proliferation in Barrett's metaplasia | |
| | | | | through activation of the CCK2 receptor. | |
| | | | | Gastroenterology. 2003 Mar; 124(3): 615-25; both of | |
| | | | | which are incorporated by reference in their entireties. | |
| 85 | HALJC43 | 288 | Modulation of caspase activity; | Caspase Apoptosis. Assays for caspase apoptosis are | A highly preferred embodiment of the invention |
| | | | particularly in transformed | well known in the art and may be used or routinely | includes a method for stimulating apoptosis in |
| | | | cells, such as colon cancer | modified to assess the ability of polypeptides of the | transformed, cancerous, or tumorigenic cells. An |
| | | | cell lines, more particularly | invention (including antibodies and agonists or | alternative highly preferred embodiment of the invention |
| | | | wherein modulation of caspase | antagonists of the invention) to promote or prevent | includes a method for inhibiting (e.g., decreasing) |
| | | | activity is performed in | caspase protease-mediated apoptosis. Assays | apoptosis of normal cells (e.g., such to increase the half- |
| | | | the presence of a chemothera- | monitoring induction of apoptosis in transformed cells | life of cells such as immune cells (e.g., B-cells) in |
| | | | peutic agent (e.g., paclitaxel). | (such as a colon cancer cell lines, such as for example, | conditions wherein there is an immune cell population |
| | | | | SW480, a TRAIL-sensitive human colorectal | deficiency). |
| | | | | carcinoma cell line (ATCC CCL-228) McNutt N S, | Highly preferred indications include neoplastic |
| | | | | Mak L L, Kim Y S.) is particularly valuable for | diseases (e.g., as described below under |
| | | | | identifying polypeptides useful for treating neoplasia. | “Hyperproliferative Disorders”), and disorders of the |
| | | | | These assays may preferentially be performed in the | immune and hematopoietic system (e.g., such as |
| | | | | presence of a chemotherapeutic agent (e.g., paclitaxel) | described below under “Immune Activity”, and “Blood- |
| | | | | to enhance assay sensitivity. Exemplary assays for | Related Disorders). Preferred indications include |
| | | | | caspase apoptosis that may be used or routinely | autoimmune diseases (e.g., rheumatoid arthritis, |
| | | | | modified to test caspase apoptosis activity of | systemic lupus erythematosis, multiple sclerosis and/or |
| | | | | polypeptides of the invention (including antibodies | as described below) and immunodeficiencies (e.g., as |
| | | | | and agonists or antagonists of the invention) include | described below). Additional preferred indications |
| | | | | the assays disclosed in Lee et al., FEBS Lett 485(2-3): | include inflammation and inflammatory disorders (such |
| | | | | 122-126 (2000); Nor et al., J Vase Res 37(3): 209-218 | as acute and chronic inflammatory diseases, e.g., |
| | | | | (2000); and Karsan and Harlan, J Atheroscler Thromb | inflammatory bowel disease and Crohn's disease). |
| | | | | 3(2): 75-80 (1996); the contents of each of which are | |
| | | | | herein incorporated by reference in its entirety. | |
| | | | | Endothelial cells that may be used according to these | |
| | | | | assays are publicly available (e.g., through | |
| | | | | commercial sources). | |
| 85 | HALJC43 | 288 | IL-8 in SW480 | Assays measuring production of IL-8 are well known | Highly preferred indications include neoplastic diseases |
| | | | | in the art and may be used or routinely modified to | (e.g. cancer) such as described herein under the heading |
| | | | | assess the ability of polypeptides of the invention | “Hyperproliferative Disorders” (particularly including, but |
| | | | | (including antibodies and agonists or antagonists of | not limited to, cancers involving cells of the gastrointestinal |
| | | | | the invention) to regulate production and/or secretion | system). Highly preferred embodiments of the invention |
| | | | | of IL-8. For example, FMAT may be used or | include methods of preventing, detecting, diagnosing, |
| | | | | routinely modified to assess the ability of | treating and/or ameliorating cancer and hyperproliferative |
| | | | | polypeptides of the invention (including antibodies | disorders involving cells of the colon. |
| | | | | and agonists or antagonists of the invention) to | |
| | | | | regulate production and/or secretion of IL-8. SW480 | |
| | | | | is a TRAIL-sensitive human colorectal carcinoma cell | |
| | | | | line (ATCC CCL-228). See, McNutt et al., Lab | |
| | | | | Invest. 44: 309-23 (1981), the contents of which are | |
| | | | | herein incorporated by reference in its entirety. | |

Description of Table 2

[0268] Table 2 summarizes homology and features of some of the polypeptides of the invention by providing the results of comparisons to protein and protein family databases. The first column provides a unique clone identifier, “Clone ID NO:”, corresponding to a cDNA clone disclosed in Table 1A or 1B. The second column provides the unique contig identifier, “Contig ID:” corresponding to contigs in Table 1B and allowing for correlation with the information in Table 1B. The third column provides the sequence identifier, “SEQ ID NO:X”, for the contig polynucleotide sequence. The fourth column provides the analysis method by which the homology/identity disclosed in the Table was determined. Comparisons were made between polypeptides encoded by the polynucleotides of the invention and either a non-redundant protein database (herein referred to as “NR”), or a database of protein families (herein referred to as “PFAM”) as further described below. The fifth column provides a description of the PFAM/NR hit having a significant match to a polypeptide of the invention. Column six provides the accession number of the PFAM/NR hit disclosed in the fifth column. Column seven, “Score/Percent Identity”, provides a quality score or the percent identity, of the hit disclosed in columns five and six. Comparisons were made between polypeptides encoded by polynucleotides of the invention and a non-redundant protein database (herein referred to as “NR”), or a database of protein families (herein referred to as “PFAM”), as described below.

[0269] The NR database, which comprises the NBRF PIR database, the NCBI GenPept database, and the SIB SwissProt and TrEMBL databases, was made non-redundant using the computer program nrdb2 (Warren Gish, Washington University in Saint Louis). Each of the polynucleotides shown in Table 1B, column 3 (e.g., SEQ ID NO:X or the ‘Query’ sequence) was used to search against the NR database. The computer program BLASTX was used to compare a 6-frame translation of the Query sequence to the NR database (for information about the BLASTX algorithm see Altshul et al., J. Mol. Biol. 215:403-410 (1990), and Gish and States, Nat. Genet. 3:266-272 (1993)). A description of the sequence that is most similar to the Query sequence (the highest scoring ‘Subject’) is shown in column five of Table 2 and the database accession number for that sequence is provided in column six. The highest scoring ‘Subject’ is reported in Table 2 if (a) the estimated probability that the match occurred by chance alone is less than 1.0 e-07, and (b) the match was not to a known repetitive element. BLASTX returns alignments of short polypeptide segments of the Query and Subject sequences which share a high degree of similarity; these segments are known as High-Scoring Segment Pairs or HSPs. Table 2 reports the degree of similarity between the Query and the Subject for each HSP as a percent identity in Column 7. The percent identity is determined by dividing the number of exact matches between the two aligned sequences in the HSP, dividing by the number of Query amino acids in the HSP and multiplying by 100. The polynucleotides of SEQ ID NO:X which encode the polypeptide sequence that generates an HSP are delineated by columns 8 and 9 of Table 2.

[0270] The PFAM database, PFAM version 2.1, (Sonnhammer, Nucl. Acids Res., 26:320-322, 1998)) consists of a series of multiple sequence alignments; one alignment for each protein family. Each multiple sequence alignment is converted into a probability model called a Hidden Markov Model, or HMM, that represents the position-specific variation among the sequences that make up the multiple sequence alignment (see, e.g., Durbin, et al., Biological sequence analysis: probabilistic models of proteins and nucleic acids, Cambridge University Press, 1998 for the theory of HMMs). The program HMMER version 1.8 (Sean Eddy, Washington University in Saint Louis) was used to compare the predicted protein sequence for each Query sequence (SEQ ID NO:Y in Table 1B) to each of the HMMs derived from PFAM version 2.1. A HMM derived from PFAM version 2.1 was said to be a significant match to a polypeptide of the invention if the score returned by HMMER 1.8 was greater than 0.8 times the HMMER 1.8 score obtained with the most distantly related known member of that protein family. The description of the PFAM family, which shares a significant match with a polypeptide of the invention, is listed in column 5 of Table 2, and the database accession number of the PFAM hit is provided in column 6. Column 7 provides the score returned by HMMER version 1.8 for the alignment. Columns 8 and 9 delineate the polynucleotides of SEQ ID NO:X which encode the polypeptide sequence which show a significant match to a PFAM protein family.

[0271] Columns 8 and 9, “NT From” and “NT To” respectively, delineate the polynucleotides in “SEQ ID NO:X” that encode a polypeptide having a significant match to the PFAM/NR database as disclosed in the fifth and sixth columns. In specific embodiments polypeptides of the invention comprise, or alternatively consist of, an amino acid sequence encoded by a polynucleotide in SEQ ID NO:X as delineated in columns 8 and 9, or fragments or variants thereof. Also provided are polynucleotides encoding such proteins, and the complementary strand thereto.

[0272] The nucleotide sequence SEQ ID NO:X and the translated SEQ ID NO:Y are sufficiently accurate and otherwise suitable for a variety of uses well known in the art and described further below. For instance, the nucleotide sequences of SEQ ID NO:X are useful for designing nucleic acid hybridization probes that will detect nucleic acid sequences contained in SEQ ID NO:X or the cDNA contained in ATCC Deposit No:Z. These probes will also hybridize to nucleic acid molecules in biological samples, thereby enabling immediate applications in chromosome mapping, linkage analysis, tissue identification and/or typing, and a variety of forensic and diagnostic methods of the invention. Similarly, polypeptides identified from SEQ ID NO:Y may be used to generate antibodies which bind specifically to these polypeptides, or fragments thereof, and/or to the polypeptides encoded by the cDNA clones identified in, for example, Table 1A and/or 1B.

[0273] Nevertheless, DNA sequences generated by sequencing reactions can contain sequencing errors. The errors exist as misidentified nucleotides, or as insertions or deletions of nucleotides in the generated DNA sequence. The erroneously inserted or deleted nucleotides cause frame shifts in the reading frames of the predicted amino acid sequence. In these cases, the predicted amino acid sequence diverges from the actual amino acid sequence, even though the generated DNA sequence may be greater than 99.9% identical to the actual DNA sequence (for example, one base insertion or deletion in an open reading frame of over 1000 bases).

[0274] Accordingly, for those applications requiring precision in the nucleotide sequence or the amino acid sequence, the present invention provides not only the generated nucleotide sequence identified as SEQ ID NO:X, and a predicted translated amino acid sequence identified as SEQ ID NO:Y, but also a sample of plasmid DNA containing cDNA ATCC Deposit No:Z (e.g., as set forth in columns 2 and 3 of Table 1A and/or as set forth, for example, in Table 1B). The nucleotide sequence of each deposited clone can readily be determined by sequencing the deposited clone in accordance with known methods. Further, techniques known in the art can be used to verify the nucleotide sequences of SEQ ID NO:X.

[0275] The predicted amino acid sequence can then be verified from such deposits. Moreover, the amino acid sequence of the protein encoded by a particular clone can also be directly determined by peptide sequencing or by expressing the protein in a suitable host cell containing the deposited human cDNA, collecting the protein, and determining its sequence.

TABLE 2

| | | | | | | Score/ | | |
|---|---|---|---|---|---|---|---|---|
| | | SEQ ID | Analysis | | PFam/NR Accession | Percent | | |
| cDNA Clone ID | Contig ID: | NO: X | Method | PFam/NR Description | Number | Identity | NT From | NT To |
| HSMPG12 | 1292274 | 11 | WUblastx.64 | (Q9H9H0) CDNA FLJ12759 | Q9H9H0 | 73% | 1848 | 1735 |
| | | | | FIS, CLONE NT2RP2001347. | | | | |
| HSMPG12 | 1292610 | 100 | WUblastx.64 | (O60448) NEURONAL | O60448 | 47% | 2376 | 1939 |
| | | | | THREAD PROTEIN AD7C- | | 63% | 1949 | 1827 |
| | | | | NTP. | | 33% | 2125 | 1841 |
| | | | | | | 45% | 2027 | 1782 |
| | | | | | | 60% | 2370 | 2191 |
| | | | | | | 66% | 2178 | 2017 |
| | | | | | | 38% | 2370 | 2269 |
| | | | | | | 41% | 1837 | 1766 |
| | | | | | | 63% | 2028 | 1963 |
| | | | | | | 66% | 1960 | 1796 |
| | | | | | | 52% | 1838 | 1764 |
| | | | | | | 62% | 2203 | 2018 |
| | | | | | | 79% | 2336 | 2190 |
| | | | | | | 48% | 1909 | 1769 |
| | | | | | | 59% | 2203 | 1835 |
| HNLJK11 | 1289619 | 12 | WUblastx.64 | (O70609) PUTATIVE | O70609 | 45% | 880 | 939 |
| | | | | INTEGRAL MEMBRANE | | 60% | 48 | 881 |
| | | | | TRANSPORT PROTEIN. | | | | |
| HNLJK11 | 1290053 | 101 | WUblastx.64 | (O70609) PUTATIVE | O70609 | 45% | 909 | 968 |
| | | | | INTEGRAL MEMBRANE | | 60% | 77 | 910 |
| | | | | TRANSPORT PROTEIN. | | | | |
| HSMPJ30 | 1289642 | 13 | WUblastx.64 | (Q9H419) DJ1056H1.1 | Q9H419 | 97% | 239 | 643 |
| | | | | (PUTATIVE LEUCINE RICH | | | | |
| | | | | PROTEIN) (FRAGMENT). | | | | |
| HSMPJ30 | 1292609 | 102 | WUblastx.64 | (Q9H419) DJ1056H1.1 | Q9H419 | 98% | 252 | 701 |
| | | | | (PUTATIVE LEUCINE RICH | | | | |
| | | | | PROTEIN) (FRAGMENT). | | | | |
| HTAOK88 | 1312306 | 14 | WUblastx.64 | tex261 protein - mouse | pir\|S47481\|S47481 | 99% | 85 | 672 |
| HTAOK88 | 1293280 | 104 | WUblastx.64 | tex261 protein - mouse | pir\|S47481\|S47481 | 99% | 97 | 684 |
| HTAOK88 | 1297164 | 105 | WUblastx.64 | tex261 protein - mouse | pir\|S47481\|S47481 | 99% | 478 | 1065 |
| HATYJ68 | 1332728 | 16 | WUblastx.64 | (Q8WUU3) Hypothetical 45.7 kDa | Q8WUU3 | 100% | 26 | 1303 |
| | | | | protein (Fragment). | | | | |
| HATYJ68 | 1296680 | 110 | WUblastx.64 | (Q8WUU3) Hypothetical 45.7 kDa | Q8WUU3 | 100% | 13 | 1290 |
| | | | | protein (Fragment). | | | | |
| HATYJ68 | 1296903 | 111 | WUblastx.64 | (Q8WUU3) Hypothetical 45.7 kDa | Q8WUU3 | 100% | 26 | 1303 |
| | | | | protein (Fragment). | | | | |
| HDSJH26 | 1291041 | 113 | WUblastx.64 | (Q9H743) CDNA: FLJ21394 | Q9H743 | 48% | 1407 | 1297 |
| | | | | FIS, CLONE COL03536. | | 57% | 1493 | 1389 |
| HNMIG09 | 1299005 | 18 | WUblastx.64 | (Q96B32) Hypothetical 35.0 kDa | Q96B32 | 78% | 106 | 387 |
| | | | | protein (Fragment). | | 86% | 164 | 1057 |
| | | | | | | 46% | 63 | 182 |
| HNMIG09 | 1299037 | 115 | WUblastx.64 | (Q96B32) Hypothetical 35.0 kDa | Q96B32 | 78% | 79 | 360 |
| | | | | protein (Fragment). | | 86% | 137 | 1030 |
| | | | | | | 46% | 36 | 155 |
| HLCMJ69 | 1299006 | 19 | WUblastx.64 | (AAH25600) Hypothetical 29.4 kDa | AAH25600 | 69% | 106 | 936 |
| | | | | protein. | | | | |
| HLCMJ69 | 1299048 | 116 | WUblastx.64 | (AAH25600) Hypothetical 29.4 kDa | AAH25600 | 69% | 94 | 924 |
| | | | | protein. | | | | |
| HNMIB80 | 1299275 | 20 | WUblastx.64 | (AAH22289) Hypothetical 44.5 kDa | AAH22289 | 100% | 483 | 1652 |
| | | | | protein. | | | | |
| HDLLA60 | 1294672 | 21 | WUblastx.64 | (Q9JJ16) PIG-O. | Q9JJI6 | 89% | 114 | 1460 |
| | | | | | | 86% | 1452 | 2132 |
| | | | | | | 29% | 195 | 404 |
| HDLLA60 | 1299173 | 117 | WUblastx.64 | (Q9JJI6) PIG-O. | Q9JJI6 | 89% | 265 | 1611 |
| | | | | | | 86% | 1603 | 2283 |
| | | | | | | 29% | 346 | 555 |
| HDLLA60 | 1299172 | 118 | WUblastx.64 | hypothetical protein | pir\|T02245\|T02245 | 100% | 1578 | 559 |
| | | | | P1.11659_3 - human | | 99% | 513 | 91 |
| | | | | | | 98% | 1818 | 1636 |
| | | | | | | 82% | 567 | 499 |
| | | | | | | 38% | 573 | 487 |
| HDSIX56 | 1320236 | 22 | WUblastx.64 | (Q96NA3) CDNA FLJ31187 | Q96NA3 | 96% | 33 | 530 |
| | | | | fis, clone KIDNE2000349, | | 34% | 540 | 617 |
| | | | | moderately similar to | | | | |
| HDSIX56 | 1291032 | 119 | WUblastx.64 | (Q96NA3) CDNA FLJ31187 | Q96NA3 | 96% | 22 | 519 |
| | | | | fis, clone KIDNE2000349, | | 34% | 529 | 606 |
| | | | | moderately similar to | | | | |
| HDSIX56 | 1291035 | 120 | WUblastx.64 | (Q96NA3) CDNA FLJ31187 | Q96NA3 | 96% | 33 | 530 |
| | | | | fis, clone KIDNE2000349, | | 34% | 540 | 617 |
| | | | | moderately similar to | | | | |
| HFLEZ28 | 1326771 | 23 | WUblastx.64 | (Q8WXI8) C-type lectin-like | Q8WXI8 | 99% | 160 | 804 |
| | | | | receptor CLEC-6. | | | | |
| HFLEZ28 | 1290037 | 121 | WUblastx.64 | (Q8WXI8) C-type lectin-like | Q8WXI8 | 99% | 171 | 815 |
| | | | | receptor CLEC-6. | | | | |
| HFLEZ28 | 1290307 | 122 | WUblastx.64 | (Q8WXI8) C-type lectin-like | Q8WXI8 | 99% | 160 | 804 |
| | | | | receptor CLEC-6. | | | | |
| HFLEZ28 | 1290045 | 123 | WUblastx.64 | (Q8WXI8) C-type lectin-like | Q8WXI8 | 99% | 188 | 832 |
| | | | | receptor CLEC-6. | | | | |
| HDMSA74 | 1336632 | 24 | WUblastx.64 | (O15460) PROLYL 4- | O15460 | 100% | 208 | 1812 |
| | | | | HYDROXYLASE ALPHA (II) | | | | |
| | | | | SUBUNIT (II). | | | | |
| HDMSA74 | 1306175 | 124 | WUblastx.64 | (O15460) PROLYL 4- | O15460 | 85% | 208 | 588 |
| | | | | HYDROXYLASE ALPHA (II) | | | | |
| | | | | SUBUNIT (II). | | | | |
| HDMSA74 | 1306392 | 125 | WUblastx.64 | (Q9P529) Hypothetical 15.2 kDa | Q9P529 | 100% | 85 | 168 |
| | | | | protein. | | 82% | 63 | 167 |
| | | | | | | 100% | 83 | 169 |
| | | | | | | 78% | 71 | 169 |
| | | | | | | 88% | 63 | 167 |
| | | | | | | 89% | 83 | 169 |
| | | | | | | 96% | 85 | 168 |
| | | | | | | 96% | 83 | 169 |
| | | | | | | 85% | 63 | 167 |
| | | | | | | 85% | 64 | 168 |
| HDMSQ09 | 1335780 | 25 | WUblastx.64 | inward rectifier K channel - | pir\|A57616\|A57616 | 99% | 18 | 1049 |
| | | | | human | | | | |
| HDMSQ09 | 1305924 | 126 | WUblastx.64 | inward rectifier K channel - | pir\|A57616\|A57616 | 95% | 2 | 832 |
| | | | | human | | | | |
| HDMSQ09 | 1306396 | 127 | WUblastx.64 | inward rectifier K channel - | pir\|A57616\|A57616 | 98% | 3 | 230 |
| | | | | human | | | | |
| HDMTG72 | 1322802 | 26 | WUblastx.64 | cytochrome-c oxidase (EC | pir\|JC1304\|OGHU6A | 100% | 46 | 336 |
| | | | | 1.9.3.1) chain VIa precursor, 1 | | | | |
| HDMTG72 | 1305913 | 128 | WUblastx.64 | cytochrome-c oxidase (EC | pir\|JC1304\|OGHU6A | 100% | 93 | 383 |
| | | | | 1.9.3.1) chain VIa precursor, 1 | | | | |
| HTAOQ18 | 1306268 | 27 | WUblastx.64 | (BAB85077) CDNA FLJ23841 | BAB85077 | 99% | 400 | 741 |
| | | | | fis, clone KAT04516. | | 98% | 182 | 403 |
| | | | | | | 100% | 88 | 180 |
| HTAOQ18 | 1306691 | 129 | WUblastx.64 | (BAB85077) CDNA FLJ23841 | BAB85077 | 99% | 412 | 753 |
| | | | | fis, clone KAT04516. | | 98% | 194 | 415 |
| | | | | | | 100% | 100 | 192 |
| HLAPM62 | 1322803 | 28 | WUblastx.64 | (Q9NX85) CDNA FLJ20378 | Q9NX85 | 54% | 490 | 293 |
| | | | | FIS, CLONE KAIA0536. | | 60% | 656 | 456 |
| HLAPM62 | 1306348 | 130 | WUblastx.64 | (Q9NX85) CDNA FLJ20378 | Q9NX85 | 54% | 474 | 277 |
| | | | | FIS, CLONE KAIA0536. | | 60% | 640 | 440 |
| HDLWY45 | 1336616 | 29 | WUblastx.64 | (Q9JJI6) PIG-O. | Q9JJI6 | 89% | 105 | 1451 |
| | | | | | | 86% | 1443 | 2123 |
| | | | | | | 29% | 186 | 395 |
| HDLWY45 | 1307490 | 131 | WUblastx.64 | (Q9JJI6) PIG-O. | Q9JJI6 | 89% | 265 | 1611 |
| | | | | | | 86% | 1603 | 2283 |
| | | | | | | 29% | 346 | 555 |
| HDLWY45 | 1307489 | 132 | WUblastx.64 | (Q9JJI6) PIG-O. | Q9JJI6 | 90% | 413 | 3 |
| HDMRQ63 | 1305906 | 31 | WUblastx.64 | (Q9N032) UNNAMED | Q9N032 | 72% | 281 | 183 |
| | | | | PROTEIN PRODUCT. | | | | |
| HDMKE89 | 1335778 | 32 | WUblastx.64 | (Q96G88) Unknown (protein | Q96G88 | 100% | 334 | 1113 |
| | | | | for MGC: 16483). | | | | |
| HDMKE89 | 1306400 | 135 | WUblastx.64 | (Q96G88) Unknown (protein | Q96G88 | 100% | 347 | 1126 |
| | | | | for MGC: 16483). | | | | |
| HNMIK76 | 1335784 | 33 | WUblastx.64 | (Q96S96) | Q96S96 | 100% | 95 | 226 |
| | | | | Phosphatidylethanolamine | | | | |
| | | | | binding protein. | | | | |
| HNMIK76 | 1306246 | 136 | WUblastx.64 | (Q96S96) | Q96S96 | 100% | 78 | 209 |
| | | | | Phosphatidylethanolamine | | | | |
| | | | | binding protein. | | | | |
| HDHMA62 | 1322683 | 34 | WUblastx.64 | (Q9NX17) CDNA FLJ20489 | Q9NX17 | 67% | 234 | 545 |
| | | | | FIS, CLONE KAT08285. | | 44% | 190 | 261 |
| HDHMA62 | 1305882 | 137 | WUblastx.64 | (060883) ENDOTHELIN B | EBP2_HUMAN | 100% | 3 | 329 |
| | | | | RECEPTOR-LIKE PROTEIN- | | | | |
| | | | | 2 PRECURSOR (ET | | | | |
| HDQDT24 | 1333991 | 35 | WUblastx.64 | (BAB84923) FLJ00168 protein | BAB84923 | 100% | 41 | 397 |
| | | | | (Fragment). | | 100% | 399 | 1760 |
| HDQDT24 | 1306219 | 139 | WUblastx.64 | (BAB84923) FLJ00168 protein | BAB84923 | 100% | 41 | 397 |
| | | | | (Fragment). | | 63% | 803 | 910 |
| | | | | | | 33% | 482 | 574 |
| | | | | | | 100% | 399 | 803 |
| HDQDT24 | 1306221 | 140 | WUblastx.64 | (BAB84923) FLJ00168 protein | BAB84923 | 99% | 218 | 1669 |
| | | | | (Fragment). | | 100% | 17 | 223 |
| HDQDT24 | 1306220 | 141 | WUblastx.64 | (BAB84923) FLJ00168 protein | BAB84923 | 100% | 46 | 627 |
| | | | | (Fragment). | | | | |
| HEOOV77 | 1318709 | 36 | WUblastx.64 | (Q96LC7) Siglec-like protein. | Q96LC7 | 100% | 68 | 2158 |
| HEOOV77 | 812736 | 142 | WUblastx.64 | (Q96LC7) Siglec-like protein. | Q96LC7 | 95% | 474 | 668 |
| | | | | | | 36% | 682 | 1230 |
| | | | | | | 39% | 522 | 644 |
| | | | | | | 98% | 646 | 1338 |
| | | | | | | 72% | 52 | 525 |
| | | | | | | 28% | 909 | 1106 |
| | | | | | | 28% | 592 | 1104 |
| | | | | | | 24% | 697 | 1065 |
| HEOOV77 | 1306137 | 143 | WUblastx.64 | (Q96LC8) Siglec-like protein | Q96LC8 | 93% | 1071 | 1475 |
| | | | | splice variant-1. | | 42% | 1077 | 1460 |
| | | | | | | 32% | 535 | 1071 |
| | | | | | | 28% | 1139 | 1336 |
| | | | | | | 96% | 115 | 1098 |
| HEOOV77 | 993277 | 144 | WUblastx.64 | (Q96LC7) Siglec-like protein. | Q96LC7 | 100% | 141 | 2132 |
| | | | | | | 35% | 2504 | 2563 |
| | | | | | | 76% | 43 | 192 |
| HERHG93 | 1332320 | 37 | WUblastx.64 | (Q9UJN8) DJ153G14.2 | Q9UJN8 | 90% | 367 | 630 |
| | | | | (PUTATIVE NOVEL | | | | |
| | | | | PROTEIN SIMILAR TO | | | | |
| | | | | WORM F55A11.1 | | | | |
| HERHG93 | 1306990 | 145 | WUblastx.64 | (Q9UJN8) DJ153G14.2 | Q9UJN8 | 90% | 367 | 630 |
| | | | | (PUTATIVE NOVEL | | | | |
| | | | | PROTEIN SIMILAR TO | | | | |
| | | | | WORM F55A11.1 | | | | |
| HESXG41 | 1306380 | 38 | WUblastx.64 | (BAB55093) CDNA FLJ14503 | BAB55093 | 72% | 280 | 134 |
| | | | | fis, clone NT2RM1000252, w | | | | |
| HESXG41 | 1306690 | 146 | WUblastx.64 | (BAB55093) CDNA FLJ14503 | BA55093 | 72% | 291 | 145 |
| | | | | fis, clone NT2RM1000252, w | | | | |
| HFKFO58 | 1306612 | 39 | WUblastx.64 | bone marrow stromal cell | pir\|A56836\|A56836 | 100% | 13 | 552 |
| | | | | surface protein BST-2 - human | | | | |
| HFKFO58 | 1313088 | 147 | WUblastx.64 | bone marrow stromal cell | pir\|A56836\|A56836 | 100% | 143 | 682 |
| | | | | surface protein BST-2 - human | | | | |
| HFPKB52 | 1323767 | 40 | WUblastx.64 | (AAH23041) Similar to RIKEN | AAH23041 | 93% | 31 | 564 |
| | | | | cDNA 2400003B06 gene. | | | | |
| HFPKB52 | 1307137 | 148 | WUblastx.64 | (AAH23041) Similar to RIKEN | AAH23041 | 94% | 45 | 725 |
| | | | | cDNA 2400003B06 gene. | | | | |
| HFPKB52 | 1307138 | 149 | WUblastx.64 | (AAH23041) Similar to RIKEN | AAH23041 | 77% | 24 | 185 |
| | | | | cDNA 2400003B06 gene. | | 100% | 406 | 780 |
| HFPKB52 | 1306234 | 150 | WUblastx.64 | (Q8WTZ3) Hypothetical 27.2 kDa | Q8WTZ3 | 41% | 298 | 390 |
| | | | | protein. | | 70% | 90 | 329 |
| HGARX38 | 1306709 | 41 | WUblastx.64 | (O60844) HOMOLOG OF | O60844 | 99% | 79 | 501 |
| | | | | RAT ZYMOGEN GRANULE | | | | |
| | | | | MEMBRANE PROTEIN. | | | | |
| HMAGO59 | 1336115 | 42 | WUblastx.64 | (O00626) SMALL | SY22_HUMAN | 100% | 100 | 378 |
| | | | | INDUCIBLE CYTOKINE A22 | | | | |
| | | | | PRECURSOR | | | | |
| | | | | (MACROPHAGE | | | | |
| HMAGO59 | 1307452 | 151 | WUblastx.64 | (O00626) SMALL | SY22_HUMAN | 100% | 100 | 378 |
| | | | | INDUCIBLE CYTOKINE A22 | | | | |
| | | | | PRECURSOR | | | | |
| | | | | (MACROPHAGE | | | | |
| HMAGO59 | 1307454 | 152 | WUblastx.64 | (O00626) SMALL | SY22_HUMAN | 100% | 62 | 340 |
| | | | | INDUCIBLE CYTOKINE A22 | | | | |
| | | | | PRECURSOR | | | | |
| | | | | (MACROPHAGE | | | | |
| HMTSX03 | 1335783 | 43 | WUblastx.64 | (Q8VCP4) Similar to | Q8VCP4 | 100% | 23 | 1495 |
| | | | | cytochrome P450, 2c40. | | | | |
| HMTSX03 | 1305931 | 154 | WUblastx.64 | (Q8VCP4) Similar to | Q8VCP4 | 100% | 6 | 623 |
| | | | | cytochrome P450, 2c40. | | | | |
| HMTUZ60 | 1306331 | 44 | WUblastx.64 | (Q26195) PVA1 GENE. | Q26195 | 59% | 993 | 931 |
| | | | | | | 59% | 526 | 344 |
| HNFKC14 | 1306655 | 45 | WUblastx.64 | (Q9N083) UNNAMED | Q9N083 | 53% | 143 | 400 |
| | | | | PORTEIN PRODUCT. | | | | |
| HNFKC14 | 1306713 | 155 | WUblastx.64 | (Q9N083) UNNAMED | Q9N083 | 52% | 163 | 429 |
| | | | | PORTEIN PRODUCT. | | | | |
| HNSQN50 | 1322736 | 46 | WUblastx.64 | (Q9D856) 2010205A06RIK | Q9D856 | 84% | 84 | 1562 |
| | | | | PROTEIN. | | 72% | 1809 | 1949 |
| HNSQN50 | 1306007 | 156 | WUblastx.64 | (Q9D856) 2010205A06RIK | Q9D856 | 63% | 857 | 970 |
| | | | | PROTEIN. | | 85% | 112 | 891 |
| HNSQN50 | 1306650 | 157 | WUblastx.64 | (Q9D909) 1810013D05RIK | Q9D909 | 72% | 392 | 532 |
| | | | | PROTEIN. | | 93% | 1 | 147 |
| HOC2T95 | 1324137 | 49 | WUblastx.64 | (O60844) HOMOLOG OF | O60844 | 100% | 172 | 672 |
| | | | | RAT ZYMOGEN GRANULE | | | | |
| | | | | MEMBRANE PROTEIN. | | | | |
| HOC2T95 | 1306715 | 159 | WUblastx.64 | (O60844) HOMOLOG OF | O60844 | 100% | 65 | 565 |
| | | | | RAT ZYMOGEN GRANULE | | | | |
| | | | | MEMBRANE PROTEIN. | | | | |
| HODNV05 | 1306656 | 50 | WUblastx.64 | (Q9N083) UNNAMED | Q9N083 | 70% | 701 | 570 |
| | | | | PORTEIN PRODUCT. | | | | |
| HODNV05 | 1306717 | 160 | WUblastx.64 | (Q9N083) UNNAMED | Q9N083 | 70% | 717 | 586 |
| | | | | PORTEIN PRODUCT. | | | | |
| HPDSA48 | 1306302 | 161 | WUblastx.64 | (Q9H387) PRO2550. | Q9H387 | 81% | 105 | 407 |
| HPDSA48 | 1306617 | 162 | WUblastx.64 | (Q9H387) PRO2550. | Q9H387 | 81% | 105 | 407 |
| HSKIT24 | 1320220 | 52 | WUblastx.64 | (Q8WWN0) Prolyl 4- | Q8WWN0 | 100% | 30 | 1628 |
| | | | | hydroxylase alpha IIa subunit | | | | |
| | | | | (EC 1.14.11.2). | | | | |
| HSKIT24 | 1308800 | 163 | WUblastx.64 | (O15460) PROLYL 4- | O15460 | 98% | 20 | 607 |
| | | | | HYDROXYLASE ALPHA (II) | | | | |
| | | | | SUBUNIT (II). | | | | |
| HSKIT24 | 1308801 | 164 | WUblastx.64 | (O15460) PROLYL 4- | O15460 | 99% | 90 | 1460 |
| | | | | HYDROXYLASE ALPHA (II) | | | | |
| | | | | SUBUNIT (II). | | | | |
| HSKIT24 | 1308799 | 165 | WUblastx.64 | (O15460) PROLYL 4- | O15460 | 81% | 12 | 107 |
| | | | | HYDROXYLASE ALPHA (II) | | 98% | 110 | 397 |
| | | | | SUBUNIT (II). | | | | |
| HSVAA83 | 1320217 | 53 | WUblastx.64 | (AAH09016) Similar to | AAH09016 | 100% | 102 | 836 |
| | | | | complement component 1, q | | | | |
| | | | | sub | | | | |
| HSVAA83 | 1308894 | 166 | WUblastx.64 | (AAH09016) Similar to | AAH09016 | 98% | 94 | 633 |
| | | | | complement component 1, q | | 45% | 440 | 192 |
| | | | | sub | | | | |
| HSVAA83 | 1313494 | 167 | WUblastx.64 | complement subcomponent | pir\|S14351\|C1HUQC | 83% | 219 | 737 |
| | | | | C1q chain C precursor - human | | 82% | 119 | 397 |
| HSVAA83 | 1313491 | 168 | WUblastx.64 | (AAH09016) Similar to | AAH09016 | 100% | 119 | 853 |
| | | | | complement component 1, q | | | | |
| | | | | sub | | | | |
| HSVAA83 | 1313490 | 169 | WUblastx.64 | (AAH09016) Similar to | AAH09016 | 100% | 118 | 852 |
| | | | | complement component 1, q | | | | |
| | | | | sub | | | | |
| HUTJT76 | 1322752 | 54 | WUblastx.64 | (Q9W2Y3) CG2974 | Q9W2Y3 | 54% | 127 | 939 |
| | | | | PROTEIN. | | | | |
| HUTJT76 | 1307189 | 170 | WUblastx.64 | (Q9W2Y3) CG2974 | Q9W2Y3 | 47% | 110 | 424 |
| | | | | PROTEIN. | | | | |
| HUTJT76 | 1313865 | 171 | WUblastx.64 | (Q9W2Y3) CG2974 | Q9W2Y3 | 54% | 110 | 922 |
| | | | | PROTEIN. | | | | |
| HUVHZ75 | 1336588 | 55 | WUblastx.64 | (Q96QV2) Porimin. | Q96QV2 | 100% | 58 | 234 |
| HVAQO59 | 1318530 | 56 | WUblastx.64 | (Q96DA0) Hypothetical 18.9 kDa | Q96DA0 | 99% | 139 | 621 |
| | | | | protein. | | | | |
| HVAQO59 | 1293499 | 173 | WUblastx.64 | (Q96DA0) Hypothetical 18.9 kDa | Q96DA0 | 77% | 330 | 356 |
| | | | | protein. | | 100% | 166 | 336 |
| | | | | | | 97% | 353 | 679 |
| HYCAD48 | 1334177 | 58 | WUblastx.64 | cathepsin L (EC 3.4.22.15) | pir\|S01177\|KHMSL | 100% | 70 | 1071 |
| | | | | precursor - mouse | | | | |
| HYCAD48 | 1305993 | 175 | WUblastx.64 | cathepsin L (EC 3.4.22.15) | pir\|S01177\|KHMSL | 100% | 59 | 1060 |
| | | | | precursor - mouse | | | | |
| HHFZF42 | 1305981 | 59 | WUblastx.64 | (Q96S97) Hypothetical 35.3 kDa | Q96S97 | 95% | 119 | 475 |
| | | | | protein. | | | | |
| HNSRC60 | 1323801 | 61 | WUblastx.64 | (Q96LZ9) CDNA FLJ32949 | Q96LZ9 | 32% | 117 | 653 |
| | | | | fis, clone TESTI2008020, | | 35% | 696 | 815 |
| | | | | weakly similar to DPY | | | | |
| HNSRC60 | 1306009 | 178 | WUblastx.64 | (Q96LZ9) CDNA FLJ32949 | Q96LZ9 | 33% | 101 | 517 |
| | | | | fis, clone TESTI2008020, | | | | |
| | | | | weakly similar to DPY | | | | |
| HFDUT84 | 1315930 | 62 | WUblastx.64 | (AAL79706) Hypothetical 9.4 kDa | AAL79706 | 93% | 704 | 790 |
| | | | | protein. | | 93% | 707 | 793 |
| | | | | | | 81% | 710 | 808 |
| | | | | | | 93% | 705 | 791 |
| | | | | | | 89% | 708 | 794 |
| | | | | | | 40% | 479 | 541 |
| | | | | | | 76% | 673 | 789 |
| HHA1S21 | 1335782 | 63 | WUblastx.64 | (Q9Z2I7) SV2 RELATED | Q9Z2I7 | 37% | 57 | 542 |
| | | | | PROTEIN. | | | | |
| HHA1S21 | 1305929 | 181 | WUblastx.64 | (Q9Z2I7) SV2 RELATED | Q9Z2I7 | 37% | 40 | 522 |
| | | | | PROTEIN. | | | | |
| HHMQL78 | 1315932 | 64 | WUblastx.64 | (Q9H189) SPHINGOSINE-1- | Q9H189 | 33% | 28 | 750 |
| | | | | PHOSPHATASE. | | | | |
| HHMQL78 | 1305936 | 182 | WUblastx.64 | (Q9H189) SPHINGOSINE-1- | Q9H189 | 37% | 19 | 1149 |
| | | | | PHOSPHATASE. | | 34% | 1 | 141 |
| HNSMZ53 | 1315502 | 65 | WUblastx.64 | (O41972) HYPOTHETICAL | O41972 | 32% | 698 | 3 |
| | | | | 66.4 KDA PROTEIN. | | 32% | 698 | 3 |
| | | | | | | 32% | 698 | 3 |
| | | | | | | 32% | 698 | 3 |
| | | | | | | 33% | 620 | 3 |
| | | | | | | 32% | 698 | 30 |
| HNSMZ53 | 1306010 | 183 | WUblastx.64 | (Q9K3E2) PUTATIVE | Q9K3E2 | 36% | 410 | 3 |
| | | | | TRANSLATION INITIATION | | 34% | 398 | 3 |
| | | | | FACTOR IF-2 (FRAGMENT). | | | | |
| HNGMJ63 | 1323768 | 66 | WUblastx.64 | (O00365) L1 ELEMENT L1.15 | O00365 | 55% | 1343 | 1552 |
| | | | | P40 PROTEIN. | | 90% | 1522 | 1743 |
| HNGMJ63 | 1306153 | 184 | WUblastx.64 | (O95662) POT. ORF VI | O95662 | 60% | 444 | 623 |
| | | | | (FRAGMENT). | | | | |
| HHMSF21 | 1306648 | 68 | WUblastx.64 | (Q9UDW7) | Q9UDW7 | 87% | 2 | 121 |
| | | | | WUGSC: H_DJ0747G18.5 | | 100% | 90 | 380 |
| | | | | PROTEIN (FRAGMENT). | | | | |
| HHMSF21 | 1306711 | 186 | WUblastx.64 | (Q9UDW7) | Q9UDW7 | 87% | 16 | 138 |
| | | | | WUGSC: H_DJ0747G18.5 | | 100% | 107 | 397 |
| | | | | PROTEIN (FRAGMENT). | | | | |
| HNSES94 | 1306632 | 69 | WUblastx.64 | (Q9D7U8) 9030623N16RIK | Q9D7U8 | 86% | 271 | 423 |
| | | | | PROTEIN. | | | | |
| HNSES94 | 1306633 | 187 | WUblastx.64 | (Q9D311) 9030623N16RIK | Q9D311 | 78% | 302 | 1261 |
| | | | | PROTEIN. | | | | |
| HHMNV67 | 1335553 | 71 | WUblastx.64 | (Q96NZ9) Proline-rich acidic | Q96NZ9 | 100% | 233 | 685 |
| | | | | protein. | | | | |
| HHMNV67 | 1306594 | 190 | WUblastx.64 | (Q96NZ9) Proline-rich acidic | Q96NZ9 | 98% | 70 | 522 |
| | | | | protein. | | | | |
| HHMNV67 | 1309728 | 191 | WUblastx.64 | (Q96NZ9) Proline-rich acidic | Q96NZ9 | 100% | 233 | 685 |
| | | | | protein. | | | | |
| HMTSU69 | 1335548 | 72 | WUblastx.64 | (Q96NZ9) Proline-rich acidic | Q96NZ9 | 94% | 112 | 537 |
| | | | | protein. | | | | |
| HMTSU69 | 1306694 | 192 | WUblastx.64 | (Q96NZ9) Proline-rich acidic | Q96NZ9 | 94% | 17 | 442 |
| | | | | protein. | | | | |
| HMTSU69 | 1307250 | 193 | WUblastx.64 | (Q96NZ9) Proline-rich acidic | Q96NZ9 | 94% | 6 | 431 |
| | | | | protein. | | | | |
| HMWCU24 | 1318364 | 73 | WUblastx.64 | (AAH07703) Unknown | AAH07703 | 100% | 148 | 1497 |
| | | | | (protein for MGC: 11308). | | | | |
| HMWCU24 | 1308840 | 194 | WUblastx.64 | (AAH07703) Unknown | AAH07703 | 99% | 140 | 541 |
| | | | | (protein for MGC: 11308). | | | | |
| HMWCU24 | 1308844 | 195 | WUblastx.64 | (AAH07703) Unknown | AAH07703 | 100% | 176 | 1525 |
| | | | | (protein for MGC: 11308). | | | | |
| HMWCU24 | 1308839 | 196 | WUblastx.64 | (AAH07703) Unknown | AAH07703 | 100% | 1 | 375 |
| | | | | (protein for MGC: 11308). | | | | |
| HCPCI91 | 1323889 | 74 | WUblastx.64 | (Q9CR48) 2610318G18RIK | Q9CR48 | 86% | 401 | 1195 |
| | | | | PROTEIN. | | | | |
| HCPBA16 | 1319147 | 76 | WUblastx.64 | (P55083) MICROFIBRIL- | MFA4_HUMAN | 100% | 164 | 922 |
| | | | | ASSOCIATED | | | | |
| | | | | GLYCOPROTEIN 4. | | | | |
| HCPBM77 | 1324637 | 77 | WUblastx.64 | (BAB85613) URB. | BAB85613 | 83% | 52 | 2901 |
| HCPBR37 | 1319172 | 78 | WUblastx.64 | (Q9H9U3) CDNA FLJ12547 | Q9H9U3 | 51% | 53 | 253 |
| | | | | FIS, CLONE NT2RM4000634. | | 45% | 63 | 266 |
| | | | | | | 41% | 34 | 243 |
| | | | | | | 46% | 29 | 250 |
| | | | | | | 39% | 63 | 266 |
| | | | | | | 42% | 63 | 266 |
| | | | | | | 47% | 67 | 264 |
| | | | | | | 42% | 63 | 263 |
| | | | | | | 48% | 87 | 266 |
| | | | | | | 46% | 23 | 253 |
| | | | | | | 42% | 53 | 247 |
| | | | | | | 45% | 67 | 264 |
| | | | | | | 45% | 88 | 264 |
| | | | | | | 46% | 53 | 253 |
| HDMTL77 | 1319253 | 80 | WUblastx.64 | (Q8UVX6) UNC45-related | Q8UVX6 | 75% | 154 | 1251 |
| | | | | protein. | | 80% | 1 | 153 |
| | | | | | | 56% | 82 | 150 |
| HDMTP20 | 1322795 | 81 | WUblastx.64 | (AAH21892) CD36 antigen | AAH21892 | 54% | 1023 | 1205 |
| | | | | (collagen type I receptor, | | 86% | 338 | 1198 |
| HDMTP20 | 1322798 | 198 | WUblastx.64 | lysosomal integral membrane | pir\|A56525\|A56525 | 100% | 81 | 992 |
| | | | | protein II - human | | | | |
| HIEAP38 | 1319262 | 199 | WUblastx.64 | DiGeorge syndrome related | pir\|I37579\|I37579 | 30% | 2747 | 2902 |
| | | | | protein DGCR2 - human | | 28% | 2426 | 2632 |
| | | | | | | 97% | 208 | 516 |
| | | | | | | 99% | 521 | 1855 |
| HIEBT86 | 1322715 | 83 | WUblastx.64 | (Q9H728) CDNA: FLJ21463 | Q9H728 | 65% | 532 | 636 |
| | | | | FIS, CLONE COL04765. | | 63% | 356 | 559 |
| HIGAN47 | 1319301 | 84 | WUblastx.64 | membrane glycoprotein gp25L - | pir\|C37273\|C37273 | 81% | 258 | 551 |
| | | | | dog | | 77% | 33 | 257 |
| HDMSW74 | 1319286 | 85 | WUblastx.64 | G-0/G-1 switch regulatory | pir\|B40409\|A40409 | 100% | 205 | 513 |
| | | | | protein 2 - human | | | | |
| HIGBG18 | 1324325 | 86 | WUblastx.64 | (Q9V6L4) CG12251 | Q9V6L4 | 33% | 703 | 864 |
| | | | | PROTEIN. | | 25% | 80 | 715 |
| HDMTE62 | 1319302 | 87 | WUblastx.64 | cytokine SDF-1-beta - human | pir\|G01540\|G01540 | 100% | 90 | 356 |
| HCPRA19 | 1324733 | 88 | WUblastx.64 | (Q99805) | T9S2_HUMAN | 64% | 708 | 749 |
| | | | | TRANSMEMBRANE 9 | | 99% | 1 | 732 |
| | | | | SUPERFAMILY PROTEIN | | | | |
| | | | | MEMBER 2 PRECU | | | | |
| HCPCB26 | 1319182 | 89 | WUblastx.64 | (Q93091) RIBONUCLEASE | RNK6_HUMAN | 99% | 279 | 728 |
| | | | | K6 PRECURSOR (EC 3.1.27.—) | | | | |
| | | | | (RNASE K6) | | | | |
| HCPCN28 | 1319035 | 90 | WUblastx.64 | B61 protein precursor - human | pir\|A36377\|A36377 | 99% | 103 | 717 |
| HABCP53 | 1322789 | 91 | WUblastx.64 | IgE Fc receptor gamma chain | pir\|A35241\|A35241 | 100% | 96 | 353 |
| | | | | precursor - human | | | | |
| HCPBO66 | 1324570 | 92 | WUblastx.64 | (AAH09016) Similar to | AAH09016 | 100% | 119 | 853 |
| | | | | complement component 1, q | | | | |
| | | | | sub | | | | |
| HCPBO66 | 1324569 | 202 | WUblastx.64 | (AAH09016) Similar to | AAH09016 | 83% | 102 | 380 |
| | | | | complement component 1, q | | 47% | 818 | 868 |
| | | | | sub | | 84% | 202 | 720 |
| HIGAT14 | 1321874 | 93 | WUblastx.64 | colipase precursor [validated] - | pir\|A42568\|XLHU | 100% | 30 | 365 |
| | | | | human | | | | |
| HALJC43 | 1320481 | 95 | WUblastx.64 | (Q95LY2) Hypothetical 40.7 kDa | Q95LY2 | 98% | 276 | 455 |
| | | | | protein. | | | | |
| HESZO72 | 1319148 | 96 | WUblastx.64 | hypothetical protein 3 - human | pir\|E41925\|E41925 | 54% | 288 | 157 |
| HESYL64 | 1319153 | 98 | WUblastx.64 | (BAB85992) Chondroitin | BAB85992 | 100% | 80 | 634 |
| | | | | beta1,4 N-acetylgalactosamin | | | | |
| HESYL64 | 1319226 | 203 | WUblastx.64 | (BAB85992) Chondroitin | BAB85992 | 97% | 12 | 275 |
| | | | | beta1,4 N-acetylgalactosamin | | 29% | 352 | 453 |
| | | | | | | 92% | 262 | 717 |

Description of Table 3

[0276] Many polynucleotide sequences, such as EST sequences, are publicly available and accessible through sequence databases and may have been publicly available prior to conception of the present invention. Table 3 provides polynucleotide sequences that may be disclaimed according to certain embodiments of the invention. The first column provides a unique clone identifier, “Clone ID”, for a cDNA clone related to contig sequences disclosed in Table 1B. The second column provides the sequence identifier, “SEQ ID NO:X”, for contig sequences disclosed in Table 1A and/or 1B. The third column provides the unique contig identifier, “Contig ID:”, for contigs disclosed in Table 1B. The fourth column provides a unique integer ‘a’ where ‘a’ is any integer between 1 and the final nucleotide minus 15 of SEQ ID NO:X, and the fifth column provides a unique integer ‘b’ where ‘b’ is any integer between 15 and the final nucleotide of SEQ ID NO:X, where both a and b correspond to the positions of nucleotide residues shown in SEQ ID NO:X, and where b is greater than or equal to a +14. For each of the polynucleotides shown as SEQ ID NO:X, the uniquely defined integers can be substituted into the general formula of a-b, and used to describe polynucleotides which may be preferably excluded from the invention. In certain embodiments, preferably excluded from the invention are at least one, two, three, four, five, ten, or more of the polynucleotide sequence(s) having the accession number(s) disclosed in the sixth column of this Table (including for example, published sequence in connection with a particular BAC clone). In further embodiments, preferably excluded from the invention are the specific polynucleotide sequence(s) contained in the clones corresponding to at least one, two, three, four, five, ten, or more of the available material having the accession numbers identified in the sixth column of this Table (including for example, the actual sequence contained in an identified BAC clone). In no way is this listing meant to encompass all of the sequences which may be excluded by the general formula, it is just a representative example. All references available through these accessions are hereby incorporated by reference in their entirety.

TABLE 3

| | SEQ | | | | |
|---|---|---|---|---|---|
| | ID | | | | |
| cDNA | NO: | Contig | EST Disclaimer | | |
| Clone ID | X | ID: | Range of a | Range of b | Accession #'s |
| HSMPG12 | 11 | 1292274 | 1-1879 | 15-1893 | AI636321, BE093329, AI887036, AA463893, AA745302, AI207476, AA302763, |
| | | | | | AA366847, AU120137, AW575605, BF916055, AA112924, AI039089, AA373861, |
| | | | | | AW071302, AA338216, AW876814, AA525293, AA320105, AA508036, BE154381, |
| | | | | | BG057631, AA133596, AA493618, AW316599, AW615560, AW102811, AW265688, |
| | | | | | AA429942, AA364006, BE160591, AA937809, AV733710, AA525807, AV706448, |
| | | | | | AV703460, AA668711, AI918419, AL041013, AI245693, AC005484, AL133519, |
| | | | | | AC004851, AC005632, AL138478, AC003041, AD000092, AL121890, AL355497, |
| | | | | | AC001228, AC006597, AC007881, AC002040, AC004019, Z82184, AC011484, |
| | | | | | AC005488, AC008474, AC005234, AL121712, AL133448, AL121903, AC004971, |
| | | | | | AC008736, AF116715, AP001717, AC004898, AF030453, AC004106, AL117344, |
| | | | | | AC006241, AC004554, AF168787, AL133243, AP001689, AC006111, AL033527, |
| | | | | | AC003007, AC007956, AL138917, AC034242, AC005786, AF254822, AC010478, |
| | | | | | AC005067, AC005005, AC007011, AL157774, AC005520, AL117333, AC005088, |
| | | | | | AL049759, AL161670, AL353194, AC018641, AL109801, AC005280, AL031591, |
| | | | | | AC010201, AF001549, AL117334, AF243527, AC011442, AC004985, AC006483, |
| | | | | | AP000359, AF003626, AC018673, AP001718, AP000501, AC016637, AC002073, |
| | | | | | AC005244, AL050335, AC018719, AL139382, Z99496, AC002425, AC006057, |
| | | | | | AL035659, AC009086, Z83844, AL137818, AC016027, AC009890, AC005231, |
| | | | | | AL022238, AC012442, AC004409, AC002347, AC007387, AC008649, AL137129, |
| | | | | | AP000477, AL031587, AC010363, AC004491, AC006329, AC005740, AC009298, |
| | | | | | AL137073, AP000555, Z93930, AC004034, AL138752, AF002223, AC009502, |
| | | | | | AL354720, AL357374, Z84469, AP000212, AP000134, AC008101, AF111169, |
| | | | | | AC006345, AP001694, AJ224877, AL138976, AC006511, AL031230, AC009247, |
| | | | | | AL358777, AL121898, AC009123, AC007436, AC004526, AC006312, AC008892, |
| | | | | | AL022328, AJ012824, AC006344, AC006388, U66061, AC020913, AC004129, |
| | | | | | AC010311, AL035086, AP000251, AL035685, AC007510, AC002349, AC004821, |
| | | | | | AC004257, AC013357, AF006752, AL136137, AL031432, AC002395, AC006077, |
| | | | | | AK021967, AP000065, AC008055, AC004448, AC020898, AL133467, AC002565, |
| | | | | | AP000030, AC008033, AC011480, AC005932, AC008928, AL033377, AL035587, |
| | | | | | AC007240, AC006125, AL139353, AC000052, AC024082, AP001711, AL121838, |
| | | | | | AP000045, AP000113. |
| HNLJK11 | 12 | 1289619 | 1-979 | 15-993 | AP001880 4. |
| HSMPJ30 | 13 | 1289642 | 1-629 | 15-643 | AI904859, AI904856, AL118505 17. |
| HTAOK88 | 14 | 1312306 | 1-1191 | 15-1205 | AC007040.2, U37359.1, AF199509.1, BC004529.1, BC007207.1, BC004191.1, |
| | | | | | BC009294.1, AB048964.1, Y14314.1, AL137476.1, BC000570.1, BC008075.1, |
| | | | | | U51587.1, AL049465.1, AB060881.1, BC002798.1, BC006103.1, AL080126.1, |
| | | | | | AL110171.1, BC000751.1, AJ299431.1, X59812.1, AL117460.1, AL133113.1, |
| | | | | | BC006133.1, AY034001.1, S69510.1, AC020581.8, BC009398.1, BC003540.1, |
| | | | | | BC001191.1, AF029750.1, S61953.1, BC004883.1, AL137554.1, AK024944.1, |
| | | | | | AF082324.1, AK027209.1, AK000489.1, AL133062.1, AK024545.1, AL137705.1, |
| | | | | | AL136850.1, BC008938.1, AF229585.1, AK027182.1, BC001056.1, AF072933.1, |
| | | | | | U57352.1, AL137534.1, AL512765.1, AK027111.1, BC000632.1, BC001792.1, |
| | | | | | AK000652.1, BC003627.1, BC005073.1, AL133558.1, AK026549.1, X89102.1, |
| | | | | | AL133098.1, AL133075.1, BC004333.1, BC006411.1, BC003656.1, BC008957.1, |
| | | | | | BC006132.1, AL117432.1, AL137268.1, AF242525.1, AF207829.1, BC002975.1, |
| | | | | | AK026597.1, AK025906.1, BC000538.1, AL080127.1, AJ406930.1, AB060839.1, |
| | | | | | S78453.1, BC009311.1, AK025549.1, BC002752.1, AB047941.1, BC007460.1, |
| | | | | | AL137547.1, U75370.1, BC000051.1, AL050282.1, AK025349.1, BC007897.1, |
| | | | | | AL122111.1, AC069550.4, AK026593.1, AK027102.1, D44497.1, AL157479.1, |
| | | | | | AL049460.1, BC004119.1, BC001470.1, AK024622.1, BC008930.1, BC008780.1, |
| | | | | | BC006332.1, AL136884.1, AL133099.1, BC002607.1, AY026527.1, AL133010.1, |
| | | | | | AJ296345.1, AJ406932.1, BC008507.1, AF276658.1, BC003683.1, AK026592.1, |
| | | | | | BC003651.1, AK027081.1, BC005805.1, AL157480.1, AF217988.1, BC004196.1, |
| | | | | | AL080159.1, AL049314.1, BC000677.1, AK025208.1, BC000750.1, AB056420.1, |
| | | | | | AL355713.1, BC007517.1, AK026494.1, AF218023.1, D00174.1, BC008282.1, |
| | | | | | AL122045.1, BC000283.1, AL583915.1, AF084644.1, AF084645.1, AL136864.1, |
| | | | | | AF146568.1, AL133619.1, AL136774.1, U94316.1, BC000077.1, BC009192.1, |
| | | | | | AK024570.1, BC002688.1, AL137526.1, AF217972.1, BC004950.1, AL133093.1, |
| | | | | | AK027129.1, H24636, W39693, W45049, AA633490, AA921999, AI278541, AI310496, |
| | | | | | AW025458, AW025934, BF112108, BF112247. |
| HDSIX96 | 15 | 1303148 | 1-523 | 15-537 | AF348209.1, D44497.1, AL136825.1, AL353625.5, AL122049.1, AK026597.1, |
| | | | | | AL162062.1, AF229585.1, AL133608.1, AL139383.14, AF044221.1, AC020581.8, |
| | | | | | AF242525.1, BC009272.1, AL133072.1, BC008938.1, AL133015.1, AJ012582.1. |
| HATYJ68 | 16 | 1332728 | 1-2812 | 15-2826 | R07730, T99057, T99655, R37064, R41271, R41271, R62178, R64567, H49171, H60780, |
| | | | | | H60779, H61001, H68372, H68371, H95212, N24890, N36310, N67278, AA002173, |
| | | | | | AA902645, AI018502, C21127, C15951, AA203416, AA490628, AA629128, AA456638, |
| | | | | | AA703639, AA759131, AA861862, AA773496, AI081206, AI081893, AI093711, |
| | | | | | AI564061, AI143497, AI627363, AI189285, AI274062, AI276146, AI286184, AI288215, |
| | | | | | AI332435, AW009618, AW103397, AW131136, AW131190, AW272533, AW272977, |
| | | | | | AW273216, AW305315, AW468560, AW512284, AW513379, BF589579, BE049226, |
| | | | | | BE646330, BG678827, BG740535. |
| HDSJH26 | 17 | 1326515 | 1-1494 | 15-1508 | W90100, AI085659, AA807689, AA225948, AA226094, AA226159, AI734058, |
| | | | | | AI734059, AI732084, AI801031, AC005052, Z74021, AJ400877, AC006039, AC026805, |
| | | | | | AC020916, AC018697, AC003982, AL445248, AC008155, AL022324, AC005225, |
| | | | | | AP000555, AC005409, AP001727, AC005553, AC005614, Z97054, AP000348, Z82975, |
| | | | | | AC004971, AL096791, AL049874, AL008716, AC009003, AL022319, AC011475, |
| | | | | | AC010205, AL031577, AC024076, AL133245, AC009032, AC005098, AC000077, |
| | | | | | AP001960, AC005969, AC005258, AL031602, AC004645, AC004073, AL355792, |
| | | | | | AP002027, Z97989, AC008372. |
| HNMIG09 | 18 | 1299005 | 1-1617 | 15-1631 | BE618324, W51897, BE618830, H56486, AA298316, AA431938, AA719301, AI333655, |
| | | | | | W48664. |
| HLCMJ69 | 19 | 1299006 | 1-1867 | 15-1881 | AC008119.6, AC004671.1, AC005871.3, AL353652.17, AC009965.9, |
| | | | | | AC013440.7, AL049696.9, AL139021.6, AC005887.3, Z94721.1, AC018682.4. |
| HNMIB80 | 20 | 1299275 | 1-2206 | 15-2220 | BF673093, BF575504, BF694689, BF574316, BF671557, BF693859, BF670644, |
| | | | | | BF790597, BF791333, BE713670, BE713433, BE699169, BE713559, BE929772, |
| | | | | | AI141895, AI201842, BF693018, AI351867, AA251985, AA197256, BF842506, |
| | | | | | BF843058, F20444, BF843074, AA194198, F36894, AI800873, F26457, AA482914, |
| | | | | | AA197255, AW970090, AA482932, F30374, F32249, F27719, F32998, AA178901, |
| | | | | | F01019, F01208, F31596, AA176342, F34858, F00856, F29622, AA194227, F29621, |
| | | | | | F36047, AA016148, F00201, BF836805, AW780379, F34860, F35465, AA252091, |
| | | | | | BF825340, F21999, BF790547, AA192776, BF842473, AI023647, BF574021, BE620234, |
| | | | | | BG251415, AI582367, BE966699, AW152369, AI950688, BG109270, BE884190, |
| | | | | | BE395908, BG178911, AI345737, AI345736, AI345397, AI307736, AW438793, |
| | | | | | BG170109, AW961388, AW059765, AI816292, BF525853, AI370392, F34620, |
| | | | | | BE895765, AV681639, BG108189, AI802372, AV756451, AV756566, AV714347, |
| | | | | | AV734425, AW022102, AV732976, AV714341, AI345310, BE252505, AV733869, |
| | | | | | AV681884, BG113863, AV758146, AV760340, AV758339, BG111535, AI541048, |
| | | | | | AV757205, BG109959, AV757362, BF337590, AI349814, AW827206, AI312258, |
| | | | | | AI349020, AI312261, BE900568, AI345224, AW088944, AI366959, AI344935, R66759, |
| | | | | | AI311892, BE881077, AI349186, AV716506, AI349957, AI811192, AI860697, |
| | | | | | BE440117, AI336634, AA824513, AI824361, AI049923, BE906641, AI345005, |
| | | | | | BF525834, AI859654, F35316, AV716313, AV713617, BE906646, AV729336, |
| | | | | | AI815101, BG108233, BG032053, AV738918, BG027650, AI307446, BF337865, |
| | | | | | AV727819, AI559752, AI312273, AI312250, BF341616, AW081451, AI609420, |
| | | | | | BG034564, BF343294, BF344540, AI343140, BG032219, AI687568, BE409226, |
| | | | | | AA853213, AV756658, BG180316, BE905726, BG114990, BG110660, BG105342, |
| | | | | | BF980991, BG032138, BG119329, AI950973, AA853539, BE775251, AV706219, |
| | | | | | AI554411, AI682958, AV736402, BF525838, AA746607, AI887775, AW075645, |
| | | | | | BF663010, AI345688, AW194014, BE245461, AI890907, AV763564, AV705065, |
| | | | | | AI469516, AW079432, AI345014, AI345677, BE613622, BE138644, AW071380, |
| | | | | | AI336565, AW168705, AI334943, AI312210, AI340533, AI817430, AI309431, |
| | | | | | AW827217, AA527133, AI340511, AI656270, BF753028, BF858085, AI334895, |
| | | | | | AI307507, AI954422, AW263569, AI310927, BE393551, BF921295, BF675852, |
| | | | | | AI336488, AW082600, AI623736, BF975552, AI625209, AV739574, AI334884, |
| | | | | | AI307543, AI699020, AI310930, AW172780, AI345114, AI312271, AA659688, |
| | | | | | BE172412, BE138712, AI345251, AW020710, AW071412, AI440238, AI307210, |
| | | | | | AI307708, AI336662, AI312325, AW071395, AI744256, BF752892, S73775, U93291, |
| | | | | | M15747, M20142, M22717, M22712, M22714, M22713, AK000250, AL110228, |
| | | | | | AK000618, AL133070, AR068466, AK026542, AL133054, E08631, S68736, AL137463, |
| | | | | | E12579, AL442082, AK026631, AL137656, AF019298, A18777, AR050959, AF132676, |
| | | | | | AF061836, AF000301, AL137267, AL049464, AF176651, AF119878, AK026532, |
| | | | | | AF116639, E12580, AF178432, X63410, X56039, AX014095, L13297, AF218014, |
| | | | | | AF218033, AK025424, AL117578, A12297, AL080129, AK025431, X66417, AL162002, |
| | | | | | AF090943, AK025084, AK026749, AF111847, A27171, AL050138, A08910, A08909, |
| | | | | | AL110280, AK024533, M79462, A08907, AF116691, A08908, AF118090, AB050431, |
| | | | | | X54971, AF130077, AK026526, U49908, I29004, AR072149, AL133081, S77771, |
| | | | | | AL137281, AK000652, AF119358, AL137521, X62773, AF119883, AF116602, |
| | | | | | AF043493, Y18680, A08913, AF116644, AF130092, AF155221, AF130068, U00686, |
| | | | | | AF040751, U49434, AL389935, X96540, AR038854, AF130059, AL110159, AL390167, |
| | | | | | AB048964, AX046716, AL050277, M30514, AF159615, AL117585, A08912, A08911, |
| | | | | | I89931, AL080127, AK026647, AL133104, AL122049, X76228, AL050280, AL157464, |
| | | | | | U62966, AL162085, AJ012582, AB044547, AF081197, AF081195, AR087170, |
| | | | | | AY004290, AR068753, AR083266, AB047248, AF113699, AL080158, E00984, I04527, |
| | | | | | AF188698, AF205861, M69222, AX011676, S76508, AL137659, AL117432, AF260436, |
| | | | | | AF126247, AK024588, AK027116, AF217989, AF151074, AF119859, U35146, |
| | | | | | AF119860, AB048975, AL137275, AL096720, AL110222, AF022813, I89934, |
| | | | | | AK026534, S61953, AL136884, AL137429, AF076464, AL049324, AR068751, |
| | | | | | AF114170, AR000496, U39656, AK025209, AL137459, AK027146, AF242376, |
| | | | | | AF311287, AF124728, AF125948, AL137558, AK000206, AB029065, AF102578, |
| | | | | | AL035458, AL355713, AL049594, Y11254, AF065135, A76337, A76335, I36502, |
| | | | | | AF305835, I92592, A91160, AB049629, AK000653, AF107018, AL035067, A49139, |
| | | | | | A57389, AB031064, AF151076, Y10823, AK000445, AR070212, S74156, AK025958, |
| | | | | | AB026675, AF017152, AL080162, AF130087, AC004878, AL049466, X57961, X72387, |
| | | | | | AC025226, AF207829, I00734, AF119894, AL359596, X52128, AK025119, AK027213, |
| | | | | | AF150103, U77351, AB038698, U68233, AB044390, I26207, AB04070, AL162062, |
| | | | | | E00617, E00717, E00778, AF177401, AF217991, AJ010277, AL133014, AL359620, |
| | | | | | AF261883, X59414, AF085809, U42766, AK024545, AL137665, AF114168, I48978, |
| | | | | | AB044545, X99717. |
| HDLLA60 | 21 | 1294672 | 1-2545 | 15-2559 | AL519738, AL521682, AL521683, BF316792, BE314080, AA877779, AI424050, |
| | | | | | BF314992, AI751048, AI276634, AA442808, BE260808, AI755039, BE313077, |
| | | | | | BF207291, AI651391, AW517333, AI433835, AI434628, AW014807, AI334136, |
| | | | | | AI050015, AI982594, BE500957, AI818408, AW513783, AI949039, AI694585, |
| | | | | | AI338143, AW236975, AI061091, AW006307, AA723500, AI912282, AL519737, |
| | | | | | AI364151, C02202, BG057194, BE670946, AI952726, AA683531, AA621124, |
| | | | | | AW003111, AA447777, AI797488, AI239942, AI334373, AI185098, BF315922, |
| | | | | | AA702809, AI358791, AI207084, H53608, AI473572, AI699267, AI906770, AI751049, |
| | | | | | AC008119, AC004671, AC005871, AL049696, AC005887, Z94721, AC018682. |
| HDSIX56 | 22 | 1320236 | 1-1980 | 15-1994 | BE899525, AL037910, AW474152, AV733328, AI445815, AI053786, AW502949, |
| | | | | | AL119958, AV762047, AW955984, AW962942, AA579469, AA484143, AA984263, |
| | | | | | AI952900, AI064811, BF725347, AA528480, AW515448, AI446474, BF668217, |
| | | | | | AA192278, AW819567, BG005696, AI049996, AA581903, AW339622, AA494038, |
| | | | | | AV758989, AV710245, AW591443, AW977540, AA491814, AL045077, F32710, |
| | | | | | H05073, AW946306, AV730245, AV706046, AI343143, AI753488, AW955986, |
| | | | | | AW088846, AW303196, AW274349, AV763540, AV738489, AU120769, AI538812, |
| | | | | | AI580244, AW975164, AW302709, T17269, AW277109, AW301350, AW819626, |
| | | | | | AI926023, AV762973, AW238016, AA814510, AI284640, AW193493, BE139267, |
| | | | | | BE138594, AW276827, AV702609, AV706237, AA525998, AW327624, T32050, |
| | | | | | AW265138, W23546, AV733352, AL037683, AI345681, AI345675, AW021774, |
| | | | | | AW970919, AI345123, BG236735, H45320, AV764104, AW268277, BF964699, |
| | | | | | AI273107, AA657752, AA994578, AA579198, C14692, AI357823, AI344810, |
| | | | | | AW995027, AL040072, R92640, AI591299, AI590522, AI952786, AI963720, |
| | | | | | AW263864, BE139358, AA515937, AW872676, AI821044, BF739175, AW630298, |
| | | | | | AI826845, BE872393, AW274182, AA223249, AW973771, AU147216, BF800435, |
| | | | | | AW973821, BF915839, AW419081, BF475757, AV682003, AW571558, AV757289, |
| | | | | | AI436378, H10143, AI804849, AU159473, AA745524, AW500125, AC020916, |
| | | | | | AL163268, AC002543, AL137818, AL050307, AC010271, AL117332, AL121891, |
| | | | | | AC021999, AL133324, AC008543, AC007842, AC004906, AC020754, AC002418, |
| | | | | | AC005291, U46117, AL136172, AL049537, AC005531, AL133245, AC004386, |
| | | | | | AF015722, AL121949, AC004231, AL034553, AC011811, AC007390, AC066590, |
| | | | | | AC024563, AL031055, AF121781, AL031846, AF134726, AL354943, AL158828, |
| | | | | | AF015720, AL049829, AP000502, AC005701, AL133163, AC011495, AC005808, |
| | | | | | AC012076, AP000018, AL049776, AL121983, AL008725, AC005288, AL136984, |
| | | | | | AC006315, AL163279, AJ229041, AC004813, AC002465, AC002544, AL096863, |
| | | | | | AC008555, U91326, AL139100, AP001409, AL109897, AC004477, AC010252, |
| | | | | | AC002036, AP002529, AC004841, Z84479, AC026704, AC006211, AL121897, |
| | | | | | AL121601, AL035593, AC007653, Z85986, AL137068, AC007687, AC024561, |
| | | | | | AC011465, AL133174, AL008721, AL022476, AC020906, AC011479, AL109804, |
| | | | | | AP000512, AL157406, AL109798, AC064878, AL354696, AC020663, AC005189, |
| | | | | | AL035405, AL035456, AJ289880, AC004596, AC012599, AC011504, AP000472, |
| | | | | | AF008243, AL135839, AL163302, AL356020, AL139109, AL121965, AC009244, |
| | | | | | AC011248, AC006254, AC024082, AL162272, AL080243, AP001683, Z94044, |
| | | | | | AL135927, AC007227, AL391259, AC005669, AF235097, AC005899, AL008729, |
| | | | | | AF051976, AC004847, AC004016, AL033378, AC006312, Z99291, AC018642, X71342, |
| | | | | | AC010462, AC003107, AC009314, AC026430, AF111169, AL136526, L32588, |
| | | | | | AC004638, AC016395, AL031848, X55448, AC018728, AL118506, AL078639, |
| | | | | | AC074331, AL035419, AL031281, AC004913, AC027319, AC005548, AF025878, |
| | | | | | AL023553, AL391684, AC003042, AL445263, AC005736, AL034372, AL138787, |
| | | | | | AC004106, AL136170, AF053356, AL355385, L17418, AL109613, Z82190, AC009073, |
| | | | | | AC006479, AC005730, AF113127, AC008482, AL135978, AL133240, AC004472, |
| | | | | | AJ271718, AL050332, AC003043, AL353807, L44140, AC005064, Z99714, AL136059, |
| | | | | | AC008685, AC022127, AL049875, Z98200, AL157951, AC009007, AC009464, |
| | | | | | AC008960, AP001730, AC004954, AC006130, AL159997, AC005255, AC011500, |
| | | | | | AC010451, AL049780, AC009248, AL133448, AL034399, Z99716, AC005409, |
| | | | | | AC003010, AL021937, AL031650, AC008616, AL163613, AB049889, AC006077, |
| | | | | | AC005832, AC005829, AL049766, AC009228, AC008372, AC008999, AL117354, |
| | | | | | AC004448, AC005254, AL121881, AC005520, Z98036, AC005578, AC005919, |
| | | | | | AL034548, AC005180, AP000244, AC018751, AL139092, AC002365, AL033529, |
| | | | | | X73501, AC005740, AC034246, AL050335, AC004824, Z83846, AC013429, AC019171, |
| | | | | | AC004519, Z96568, AC005593, AF111168, AL136139, AL121989, AP000466, |
| | | | | | AC004558, AF196969, AC009783. |
| HFLEZ28 | 23 | 1326771 | 1-2194 | 15-2208 | AW074559 BF902179. |
| HDMSA74 | 24 | 1336632 | 1-2230 | 15-2244 | U90441.1, AC034220.4, AC063976.4, L81778.1, AC000960.1, L81779.1, |
| | | | | | L81775.1, L77044.1, L81777.1, AC002195.1, L81780.1, T92264, T92307, T76935, |
| | | | | | R21366, W02079, W32344, W48585, W49521, W49522, W56185, W65411, W65283, |
| | | | | | W74102, W79640, W93222, AA101645, AA101646, AA122348, AA121094, AA187249, |
| | | | | | AA187381, AA532770, AA534967, AA552174, AA554437, AA563830, AA602466, |
| | | | | | AA622607, AA622686, AA631152, AA633074, AA640158, AA569099, AA569676, |
| | | | | | AA809721, AA829366, AA872769, AA931695, AA932681, AA994954, D11983, |
| | | | | | AA634901, AA780996, AA815280, AA889850, AA927942, AA972083, AI026074, |
| | | | | | AI092353, T17031, F13103, F09788, F10703, AI278609, AI300899, AI318128, |
| | | | | | AI343598, AI359372, AI393520, AI457850, AI123116, AI146502, AI188956, AI247653, |
| | | | | | AI278640, AI802225, AI936179, AI952621, AW026483, AW084950, AW089800, |
| | | | | | AW239196, AW301839, AW304638, AW511426, AW517270, AW664288, BF508501, |
| | | | | | BG678261, BE909941, AV748278. |
| HDMSQ09 | 25 | 1335780 | 1-2124 | 15-2138 | AC003969.1, D50582.1. |
| HDMTG72 | 26 | 1322802 | 1-452 | 15-466 | M83308.1, U66875.1, AL162062.1, AL122121.1, AL133016.1, AK026630.1, |
| | | | | | AK024538.1, AK024524.1, BC004958.1, AK026480.1, S78214.1, AB063079.1, |
| | | | | | BC001045.1, AB056421.1, AL137521.1, AB052191.1, X69819.1, AF219137.1, |
| | | | | | AL133560.1, BC007326.1, AF218014.1, AL512719.1, AF132676.1, AF061836.1, |
| | | | | | BC008387.1, U42766.1, AF090900.1, AK026462.1, AB060908.1, AK027164.1, |
| | | | | | AF111847.1, AL512718.1, AF177336.1, AL359620.1, AF285167.1, AK026528.1, |
| | | | | | AK000137.1, BC008904.1, BC002839.1, AK026865.1, AK026542.1, AB055303.1, |
| | | | | | AB060887.1, AL137271.1, AK026532.1, AK000718.1, AL050393.1, AF271350.1, |
| | | | | | AK026408.1, AL353940.1, BC008070.1, U39656.1, AF217987.1, AK000083.1, |
| | | | | | AK025383.1, AF125948.1, BC007198.1, AK025967.1, BC003687.1, AL137463.1, |
| | | | | | AK026741.1, AK000323.1, BC007199.1, AL512684.1, AB063070.1, AL049430.1, |
| | | | | | Z82022.1, AK025414.1, AL110221.1, AL117457.1, AK027868.1, AK000614.1, |
| | | | | | AL137556.1, AF348209.1, AL049464.1, BC006807.1, AB056420.1, AF207829.1, |
| | | | | | X72889.1, AL122110.1, AF091084.1, AK027113.1, AL122049.1, AL117394.1, |
| | | | | | AK000647.1, AK026597.1, AL133080.1, AL080159.1, AB047615.1, AK025092.1, |
| | | | | | AL117460.1, AK025798.1, AK025632.1, Y14314.1, AL133077.1, AL137527.1, |
| | | | | | AL133072.1, AL110280.1, AL137476.1, AL512750.1, AK024588.1, AL359622.1, |
| | | | | | AK027096.1, AF090943.1, AF097996.1, AL122050.1, AK027116.1, AL049314.1, |
| | | | | | BC004951.1, AL117583.1, AL136844.1, AB060929.1, AL512746.1, AL137538.1, |
| | | | | | AL133606.1, AK026593.1, AF111112.1, AL136928.1, AL080074.1, AK000432.1, |
| | | | | | AK026642.1, AB063008.1, AL512733.1, BC007355.1, AL050277.1, AK026452.1, |
| | | | | | BC008365.1, AF090901.1, AL136799.1, X65873.1, AL133565.1, AL080060.1, |
| | | | | | U80742.1, AL049452.1, AB060826.1, AB048953.1, BC008417.1, AL512754.1, |
| | | | | | AL359583.1, AB060863.1, AK000486.1, AK027204.1, AK025524.1, BC003684.1, |
| | | | | | AL390167.1, AJ012755.1, AL389939.1, AL162002.1, BC008780.1, Y16645.1, |
| | | | | | AK026592.1, AK026583.1, BC006164.1, AL133640.1, BC001967.1, AK026045.1, |
| | | | | | BC008280.1, AL117585.1, AB063084.1, AL133557.1, AL136768.1, AK025254.1, |
| | | | | | AL442082.1, AF146568.1, AK026551.1, AL133113.1, AL136892.1, AL136787.1, |
| | | | | | AL122123.1, AF090934.1, AL050024.1, AL049382.1, AK026784.1, BC005678.1, |
| | | | | | AF090903.1, AK025484.1, AL110225.1, BC008488.1, AK026086.1, AL137550.1, |
| | | | | | AL110196.1, AK026353.1, AL162006.1, AF113222.1, AK025491.1, AB055368.1, |
| | | | | | AK026927.1, AL359615.1, AL512765.1, AL080137.1, AB056768.1, AK026534.1, |
| | | | | | BC006412.1, AL080124.1, AF061943.1, AF078844.1, AL389978.1, AK025958.1, |
| | | | | | AL136540.1, BC002733.1, AL122098.1, AK026608.1, AL389982.1, AL136805.1, |
| | | | | | AB019565.1, AF026816.2, AL049466.1, AL133067.1, X82434.1, BC005890.1, |
| | | | | | AK026526.1, AB050510.1, AF225424.1, BC005168.1, BC006440.1, AK026744.1, |
| | | | | | AB048954.1, AB055366.1, AJ242859.1, AF183393.1, AB060852.1, AK026855.1, |
| | | | | | AL133075.1, BC003548.1, AL050149.1, AK025772.1, AF260566.1, AL157431.1, |
| | | | | | BC004556.1, BC008893.1, AL050138.1, BC009341.1, AB049892.1, AK000652.1, |
| | | | | | BC008382.1, AL162083.1, BC003683.1, AK026504.1, AL049300.1, AL133093.1, |
| | | | | | AB048964.1, AL512761.1, BC004370.1, AB055374.1, AB050534.1, AL050172.1, |
| | | | | | AK025209.1, AK026947.1, BC001349.1, AL137459.1. |
| HTAOQ18 | 27 | 1306268 | 1-871 | 15-885 | AA132529, AA279840, AA584408, AA618529, AI307481, AI340993, AI340991, |
| | | | | | AI341293, AI349083, AI420833, AI650609, AI659582, AI765658, AI912836, AI810740, |
| | | | | | AI915440, AI969924, AW003514, AW299502, AW299513, AW299522. |
| HLAPM62 | 28 | 1322803 | 1-645 | 15-659 | AP002453.3, AL031311.1, AL121586.31, AL109804.41, AP000510.2, |
| | | | | | AL163032.3, AC008962.8, AC008626.5, AL079335.29, AC011443.6, AC025166.7, |
| | | | | | AL161669.5, AC005261.1, AC020908.6, AC034251.5, AC007722.9, AL160411.25, |
| | | | | | AC007956.5, AC055120.5, AC005180.2, AP001760.1, AC011495.6, AC006312.8, |
| | | | | | AC020916.7, AL121972.17, AC005225.2, AL096701.14, AP000555.1, |
| | | | | | AC004835.2, AC011470.5, AC002472.6, AC004386.1, AL391834.8, AL136097.10, |
| | | | | | AC004985.2, AL022320.23, AC006275.1, AL022318.2, AC004695.1, |
| | | | | | AC007664.12, AC073366.3, AC010319.7, AL591770.1, AL135905.6, |
| | | | | | AL354808.24, AC004755.2, AC018738.4, AC006241.1, AP001725.1, |
| | | | | | AL391280.15, AL591398.2, AC027319.5, U78027.1, AC007686.5, AL138824.19, |
| | | | | | AC006011.2, AL356095.11, AL513008.14, AC020904.6, AC008784.6, |
| | | | | | AL035422.12, AL590763.1, AF217796.1, AL162272.10, AL023575.1, |
| | | | | | AL356257.14, AC022516.4, AC020945.6, AL135927.14, AC007227.3, |
| | | | | | AC002302.1, AC005052.2, AB023048.1, AL049856.1, AC005089.2, AL121808.4, |
| | | | | | AP001052.1, AC005839.1, AC009068.10, AL590762.1, AC018904.6, AC010150.3, |
| | | | | | AC016898.6, AC007637.9, AF030453.1, AC012476.8, AF001549.1, AL023284.1, |
| | | | | | AC018751.30, AC005000.2, AC004686.1, AC084200.22, AC073073.2, |
| | | | | | AC008747.5, AC011475.6, AC008569.6, AL121655.1, AC015651.18, Z95115.1, |
| | | | | | AF243527.1, AE006463.1, AL162390.9, AC011455.6, AL139352.16, AC007327.1, |
| | | | | | AP001752.1, AL451126.18, AC025262.27, AC022217.5, AC020906.6, |
| | | | | | AC002045.1, AL050349.27, Y10196.1, AP001717.1, AC091529.1, U73024.1, |
| | | | | | AC008280.4, AC010205.5, AC011485.6, AC090527.3, AC005300.10, AL133246.2, |
| | | | | | AL132642.4, AL078477.5, AC013449.8, AB014460.1, AC008946.6, AL158207.15, |
| | | | | | AL139396.17, AP000704.2, AC009032.7, AP002981.2, AC005740.1, Z82215.1, |
| | | | | | AL022322.1, AL133163.2, AC005921.3, AL031681.16, AC010378.6, U80459.1, |
| | | | | | AB053170.1, AC005913.2, AC009161.12, AP000553.1, AC000360.35, |
| | | | | | AL121594.6, AC006163.1, AC008403.6, AC003043.1, AC002300.1, AC010320.9, |
| | | | | | AC011450.4, AC008736.6, AC008392.6, AL157838.24, AC009311.3, AC090939.1, |
| | | | | | AC002301.1, AL078638.9, AC005378.2, AC007964.3, AF283320.1, AP000104.1, |
| | | | | | AL022328.21, AC009953.4, AC008760.6, AC005600.1, AC010422.7, |
| | | | | | AL049760.26, AC018808.4, AL121890.34, AL033521.2, AC073838.6, |
| | | | | | AC083884.6, AC022083.6, AC006039.2, AL138787.11, AC006211.1, AC004821.3, |
| | | | | | AL137139.9, AC002350.1, AL353804.22, AC020663.1, AL049872.3, |
| | | | | | AC007617.10, AC005088.2, AC010219.4, AL132640.4, AL390838.26, |
| | | | | | AC004805.1, AL138752.5, AC013717.8, AC007739.2, AC019205.4, AP000665.5, |
| | | | | | AL445685.17, AF196779.1, Z98047.1, AC005067.2, AC008848.7, AL035704.9, |
| | | | | | AC004185.1, AL353807.18, AL031848.11, AC010525.4, AC004659.1, |
| | | | | | AC009131.6, AC005102.1, AP000295.1, AL121920.21, Z93015.9, Z83844.5, |
| | | | | | AC008474.7, AL133153.3, AL096766.12, AC005829.1, AL034548.25, |
| | | | | | AC012076.4, AC007182.3, AC005736.1, AC073138.3, AC006435.7, AC004166.12, |
| | | | | | AL139350.17, AL162426.20, AC008521.5, AP000901.5, AC011740.7, AC009060. |
| | | | | | 7. |
| HDLWY45 | 29 | 1336616 | 1-2515 | 15-2529 | BC001030.1, AC004472.1, AC008397.7, AL162742.9, AC005081.3, |
| | | | | | AC007272.3, AL049539.21, AP001726.1, AC005756.1, AC002365.1, AC010789.9, |
| | | | | | AC008009.4, AP000553.1, AC018751.30, AC013356.8, AF111168.2, Z97054.1, |
| | | | | | AC020908.6, AP002436.3, AL163032.3, AP001727.1, AL138743.5, AF195953.1, |
| | | | | | AP001732.1, AC009155.3, AC004491.1, AC005102.1, AC006480.3, AC006441.13, |
| | | | | | AL161670.4, Z94161.5, AC002073.1, AC021188.6, AF196970.1, AL360227.17, |
| | | | | | AP001746.1, AC005184.1, AC006449.19, AC020928.6, AP000893.5, AC005479.2, |
| | | | | | AC008050.6, AC009077.7, AB001523.1, AL122004.17, AL021937.1, AC008556.5, |
| | | | | | AL137162.25, AF219991.1, AC009309.4, AL133245.2, AL136170.12, |
| | | | | | AL445928.8, AC078818.19, AC010412.7, AL357515.26, AC011473.4, |
| | | | | | AC072052.6, AC002425.1, AL139415.10, U52112.1, AC005038.5, AC005212.1, |
| | | | | | AL121829.30, AC004242.1, AP001753.1, AC022211.5, AC090514.1, AL590762.1, |
| | | | | | AC007386.3, AL133215.16, AC079602.15, AC007963.7, AL139316.5, |
| | | | | | AF196969.1, AL117692.5, AC011737.10, AC022415.5, AC004826.3, AC020906.6, |
| | | | | | AL133485.3, AC005840.2, AC004962.1, AC020916.7, AC012596.4, AF053356.1, |
| | | | | | AL163279.2, T65358, AA152460, AA534780, AA582939, AA152461, AA669179, |
| | | | | | AA772164, F02268, T65159, F11928, AI289515, AI478677, AI570960, AW149348, |
| | | | | | AW300676, AW303794, AW338016, AW440459, AW613621, BG056471, BE645568, |
| | | | | | BG743656. |
| HDMKF05 | 30 | 1322800 | 1-371 | 15-385 | AI341730, AI217685, AI553920, F20632, AA993197, F20502, BF055359, F31328, |
| | | | | | F34234, AA346041, F26773, F30239, AI887906, BE219044, F32555, F17258, F37890, |
| | | | | | AI685625, F29975, AW468833, AC005568. |
| HDMRQ63 | 31 | 1305906 | 1-597 | 15-611 | AU146072, AI703042, AW945625, T66946, AW945636, AA283081, H71659, |
| | | | | | AW947234, BF112272, AA058312, AL119931, AI884375, AA652884, AI801504, |
| | | | | | AI033585, AI609370, AW947228, AW974752, AC022596, AL132653, Z98884, |
| | | | | | AC005562, AC020904, AL035685, AL121776, AL031727, U95739, Z85996, AC008569, |
| | | | | | AC006449, AC004824, AC004257, AL353898, AC000003, AL121897, AC002477, |
| | | | | | AB018304, AL022323, AC011605, AC012088, AF311103, AC004851, Z98941, |
| | | | | | AC007546, AL033528, AB014077, AC004209, AP000513, AL080243, AC002070, |
| | | | | | AC011480, AC007676, AL031587, AC005015, AL157789, AC011510, AP000080, |
| | | | | | AL033521, AL008723, AC011479, AC006539, AC011533, AK021913, AL031658, |
| | | | | | AC002395, Z23789, AC011465, U91323, AL356244, AL034379, AL035684, AC002550, |
| | | | | | AC005753, AL023875, AC004089, AL137073, AP001727, AL133354, AC006088, |
| | | | | | AC006011, AF107885, AL031651, AC005625, AC004685, AC005081, Z95331, |
| | | | | | AC002476, AC006013, AC007388, AL137230, AC005694, AC010527, AC008395, |
| | | | | | AC005871, AC008403, AC005800, U62292, AC003102, U63721. |
| HDMKE89 | 32 | 1335778 | 1-1210 | 15-1224 | None |
| HNMIK76 | 33 | 1335784 | 1-1219 | 15-1233 | AI732364, AA573657, BF853000, BF853537, BF852995, BF853928, BF852989, |
| | | | | | BF853580, H83784, BF853920, BF846063, BF846065, BF846059, BF848190, BF848191, |
| | | | | | BF854481. |
| HDHMA62 | 34 | 1322683 | 1-777 | 15-791 | AC005086.2, AC011497.6, AL049843.18, AC004526.1, AC013429.12, |
| | | | | | AC011450.4, AE006464.1, AC005736.1, AL137073.13, AL136295.3, AC020908.6, |
| | | | | | AC022384.4, AL034549.19, AC002316.1, AC007052.4, AC005670.1, AC012502.3, |
| | | | | | Z93015.9, AC003982.1, AL159159.21, AC006480.3, AC083868.2, AL157838.24, |
| | | | | | AC010319.7, AC008745.6, AC008264.10, AC016395.4, AC022383.3, AC004534.1, |
| | | | | | AP001053.1, AC010149.8, AC005871.3, AL034379.8, AP001730.1, AL133243.1, |
| | | | | | AF243527.1, AL035587.5, AL160175.5, AL133174.15, AP002815.3, AC008481.7, |
| | | | | | AC004000.1, AC007664.12, AC005821.1, AC008753.8, AC004797.1, AC011510.7, |
| | | | | | AL139415.10, AC011472.7, AP001731.1, AC004805.1, AC090948.1, AC005280.3, |
| | | | | | AC007666.12, AL117333.26, AC005088.2, AC002472.6, AL135927.14, |
| | | | | | AC000353.27, AC005921.3, AC005274.1, Z82206.1, AL137229.4, AC067941.7, |
| | | | | | AC005056.2, AL121920.21, AC091394.2, AL513366.11, AC010419.5, |
| | | | | | AL135798.5, AL133444.4, AC018828.3, AL136228.8, AP001718.1, AC021016.4, |
| | | | | | AC091529.1, AC011455.6, AP001666.1, AC003037.1, AL159191.4, AL117381.32, |
| | | | | | AF196779.1, AC006552.7, AC007277.2, Z95113.2, AC068319.4, AP001759.1, |
| | | | | | AL031767.13, AL137162.25, AC004878.2, AC008050.6, AC032011.14, |
| | | | | | AC005020.5, AC004166.12, AC008622.5, AL133367.4, AC005920.1, AC090005.1, |
| | | | | | AF053356.1, AC005082.3, AL355343.18, AC006449.19, AL049776.3, |
| | | | | | AL049697.9, AC008687.4, AL008583.1, AC005207.1, Z99716.4, AL121957.15, |
| | | | | | AC017079.5, AL583834.6, AL138787.11, AL031587.3, AC009309.4, Z94056.1, |
| | | | | | AL049539.21, AC011895.4, AL117692.5, AC005399.19, AL354815.10, |
| | | | | | AF030453.1, AC025280.4, AC007957.36, AL359986.15, AC004659.1, |
| | | | | | AC005098.2, AL139182.24, AC025430.5, AL158040.13, AC007993.15, |
| | | | | | AP000130.1, AP000208.1, AL157938.22, AP000020.2, Z85986.1, AC010742.4, |
| | | | | | AC005005.1, AC006501.5, AP000665.5, AP001714.1, AP000247.1, AC034242.5, |
| | | | | | AC005520.2, AL136170.12, AC005993.2, AC011247.10, AC018641.3, Z81010.2, |
| | | | | | Z98200.8, AC006538.1, AL121748.6, AC018506.4, AB023048.1, AC004840.3, |
| | | | | | AC008543.7, AC006435.7, AC005701.1, AC002544.1, AC009488.5, AL360227.17, |
| | | | | | AL024498.12, AL157911.4, AC011489.6, AP001720.1, AC007193.1, AC003684.1, |
| | | | | | AC005261.1, AC009470.4, AC005184.1, AJ400877.1, AC002425.1, AL589786.8, |
| | | | | | AC005971.5, AL139113.21, AF024534.1, AC010150.3, AL139321.28, |
| | | | | | AF001548.1, AC090509.1, AL138688.27, AC009131.6, AF031078.1, AC004598.1, |
| | | | | | AC008132.35, U52112.1, L44140.1, AC026866.8, AL139330.17, AL121992.24, |
| | | | | | AC011446.6, AL031658.11, AF030876.1, Z83826.12, U80017.1, AC004253.1, |
| | | | | | AC002302.1, D86992.1, AL022313.1, AL356257.14, Z82244.1, AC010363.6, |
| | | | | | AP001256.2, AC006994.4, AL049631.7, AP000223.1, D88270.2, AC011811.42, |
| | | | | | AC003695.1, AL132640.4, AF165926.2, AL050335.32, AC073316.6, |
| | | | | | AL162426.20, AF001552.1, AC005522.2, AC023491.21, AC012368.6, |
| | | | | | AC012450.9, AC004813.2, AP001678.1, U07562.1, AL035407.15, AF156673.1, |
| | | | | | AF336797.2, AL049636.22, AP001710.1, AC005183.2, AC005856.1, AC006323.3, |
| | | | | | AL354776.15, AC006088.1, AC008266.3, AL356785.18, AP001711.1, |
| | | | | | AL031005.1, AC008891.7, AL138784.30, AL109921.21, AL161779.32, |
| | | | | | AP001712.1, AC012170.6, AP000557.2, AL121972.17, AF045555.1, AC006530.4, |
| | | | | | AP000510.2, AL132712.4, AC005690.8, AC005330.2, AC005011.2. |
| HDQDT24 | 35 | 1333991 | 1-1820 | 15-1834 | AC011452.6, AL389935.1, AK027116.1, AL137665.1, AL133070.1, AL136825.1, |
| | | | | | AL136781.1, BC003591.1, AK025099.1, AF210052.1, BC004349.1, BC000799.1, |
| | | | | | AL050149.1, AL157480.1, AK026541.1, AK027146.1, BC008282.1, AL110218.1, |
| | | | | | BC007556.1, BC004181.1, AK026389.1, AB060888.1, AK025015.1, AL137558.1, |
| | | | | | AL133049.1, AL133084.1, BC008488.1, D44497.1, AL049339.1, S77771.1, |
| | | | | | AF260566.1, BC004119.1, AF352728.1, AB048994.1, BC000650.1, BC008365.1, |
| | | | | | AK024524.1, BC001785.1, AK000603.1, X83544.1, AK000137.1, AF132730.1, |
| | | | | | BC006414.1, AF205861.1, U00686.1, AL442082.1, AL133054.1, AK000655.1, |
| | | | | | AL136765.1, AK026534.1, AF115392.1, BC000677.1, AF159141.1, BC004923.1, |
| | | | | | AL049464.1, AL357195.1, AL136892.1, X76228.1, X99226.1, AF002985.1, |
| | | | | | AL136763.1, AL122049.1, AF320073.1, AL512684.1, AB055370.1, AJ299431.1, |
| | | | | | BC007571.1, X59812.1, AB044547.1, AL136843.1, AL137574.1, AL162062.1, |
| | | | | | AL133608.1, BC001844.1, AL110222.1, S76508.1, BC008417.1, BC004533.1, |
| | | | | | AL136884.1, BC000051.1, BC004945.1, AF131773.1, AL359622.1, AF285836.1, |
| | | | | | AK026057.1, BC004370.1, BC004324.1, AL122101.1, BC006087.1, BC002844.1, |
| | | | | | AF022813.1, AC004200.1, BC000778.1, AF271350.1, AL162004.1, AK025391.1, |
| | | | | | AK027095.1, AF249267.3, AF013249.1, AL049423.1, AK026744.1, AL133099.1, |
| | | | | | AK026844.1, AK025119.1, BC008717.1, AF040751.1, AF227198.1, AL049347.1, |
| | | | | | AL161802.15, AC006451.5, AJ406939.1, AK026647.1, S78453.1, BC005073.1, |
| | | | | | AB047941.1, AB048881.1, AK025084.1, AB050421.1, AL157479.1, BC001045.1, |
| | | | | | BC002471.1, BC002473.1, AL137488.1, AF230496.1, AY034001.1, BC005002.1, |
| | | | | | AK026542.1, BC009026.1, AF358829.1, AL136850.1, BC003573.1, AL080159.1, |
| | | | | | BC003101.1, AL136766.1, BC004336.1, AK025350.1, AF017790.1, D00174.1, |
| | | | | | Y14314.1, BC000570.1, AF321617.1, AL050155.1, AL096751.1, AF055917.1, |
| | | | | | AL137550.1, AL391244.11, BC001675.1, BC008382.1, BC000008.1, AK024588.1, |
| | | | | | AK024992.1, BC009311.1, AK024533.1, AK024538.1, AK026480.1, AL137478.1, |
| | | | | | BC006832.1, BC002355.1, BC003110.1, AL359596.1, BC008280.1, Z82022.1, |
| | | | | | AK026762.1, BC003569.1, AF183393.1, AF113222.1, AK027164.1, AL122098.1, |
| | | | | | AF106697.1, AL133015.1, BC007898.1, AL137529.1, BC007680.1, BC004874.1, |
| | | | | | AF151109.1, BC002736.1, AK027142.1, BC008763.1, AL096720.1, BC000235.1, |
| | | | | | AL080126.1, AB062978.1, AL050138.1, AL137480.1, AL110269.1, AL110280.1, |
| | | | | | AK027868.1, AL359618.1, AC078878.20, D55641.1, BC003678.1, BC002985.1, |
| | | | | | Y11435.1, BC004899.1, AL133067.1, BC001774.1, AF218031.1, AL050277.1, |
| | | | | | BC006480.1, AB048919.1, AB055352.1, AK000257.1, AF090903.1, AL096744.1, |
| | | | | | AF084644.1, AF084645.1, BC006287.1, AB047609.1, BC002476.1, AL133072.1, |
| | | | | | X65873.1, AJ006417.1, AF061573.2, M80340.1, D83032.1, AL137537.1, |
| | | | | | BC005835.1, AL122110.1, BC003687.1, BC009221.1, AL133080.1, AB050410.1, |
| | | | | | AK025906.1, AL049314.1, AF218000.1, AL133081.1, AL136828.1, M85165.1, |
| | | | | | BC008785.1, AF126488.1, BC005843.1, BC008025.1, AF081195.1, AF348209.1, |
| | | | | | AL353625.5, AC009953.4, AC090941.1, AL137463.1, AF217991.1, AC010530.7, |
| | | | | | BC004883.1, AL137530.1, AK024601.1, AF225424.1, AB060837.1, AL122106.1, |
| | | | | | AB048914.1, BC001763.1, AK024974.1, AL137554.1, AA970014, AI307671, |
| | | | | | AI218392, AI830021, AI859620, AI873619, AI887204, AI949469, AW194364. |
| HEOOV77 | 36 | 1318709 | 1-3275 | 15-3289 | AF310233.1, AC008750.7, AC011452.6, AC018755.3, AL391136.9, AC006337.4, |
| | | | | | AC005874.3, AF134471.1, AC007263.4, AL160411.25, AC074121.16, |
| | | | | | AP001053.1, AC021188.6, AC066597.4, AC020914.7, AL133373.5, AL356805.5, |
| | | | | | AC027124.4, AC010510.6, AL158172.5, AC002375.1, AC011490.7, AC005522.2, |
| | | | | | AC005095.2, AL160269.14, AP000665.5, AC007546.5, AL049872.3, AC005011.2, |
| | | | | | AL139350.17, AC026704.4, AP000509.1, AC007536.9, AC005228.1, AC007003.4, |
| | | | | | AC016594.6, AC012320.6, AC006509.15, AL109806.22, AL117338.15, |
| | | | | | AC005207.1, AP002788.3, AL136418.4, AL139054.1, AC015987.5, AC023051.21, |
| | | | | | AL139824.22, AC005799.1, U91318.1, D84394.1, AL137190.5, AC003037.1, |
| | | | | | AL359236.4, AC004067.1, AP001623.1, AC026122.14, AP001705.1, |
| | | | | | AL157414.19, AC027130.5, AC022202.12, AC025540.7, AC004702.1, |
| | | | | | AC007225.2, AC083866.2, U52112.1, AC005953.1, AC083868.2, AL445071.14, |
| | | | | | AP000240.1, Z98257.1, AC079468.3, AC016405.8, AC007685.2, AC016643.6, |
| | | | | | AC083864.2, AC006387.3, AC004605.1, AC016587.7, AL109918.25, AC008784.6, |
| | | | | | AC005482.2, AC090942.1, AL359644.10, AL162584.9, AC020915.6, AP001746.1, |
| | | | | | AL136162.17, AC027125.4, AC004185.1, AC010485.5, AC083872.2, AC078841.4, |
| | | | | | AC004797.1, AC022392.4, AC090527.3, AC006088.1, AC006059.3, AC006582.13, |
| | | | | | AC090883.1, AC015555.13, AL138755.13, AP000353.2, AC004965.2, |
| | | | | | AL139383.14, AC004791.1, AL162423.18, AC012064.3, AC025168.7, |
| | | | | | AL365275.11, AC034200.6, AL163032.3, AF207955.1, Z92546.2, AP000789.4, |
| | | | | | AL035414.30, AC005261.1, AC004980.4, AC073316.6, AP001708.1, AC007160.3, |
| | | | | | AL133510.13, AF172277.1, Z97055.1, AL117258.4, AC011093.6, AC009484.3, |
| | | | | | AP000893.5, AP000953.2, AP001710.1, AP001684.1, AC002331.1, AC009946.2, |
| | | | | | AL359218.4, AC016057.5, AL137800.12, AC004887.2, AC004964.2, |
| | | | | | AC016759.11, AL031767.13, AB023050.1, AL161897.6, AP001694.1, |
| | | | | | AC020644.6, AC007221.2, AL355101.2, AC020728.4, AL136969.7, AC009475.4, |
| | | | | | AC008651.7, AC004510.1, AL162503.12, AC005993.2, AL161657.22, |
| | | | | | AC011456.2, AL096776.12, AC007376.9, AC007773.1, AC015973.2, AC018731.5, |
| | | | | | AC019052.7, AC009060.7, AC011311.11, AL359554.7, AL451075.15, |
| | | | | | AC004976.1, AL162293.22, AL121657.2, AL442166.1, AC004825.2, AC004838.2, |
| | | | | | AL109947.19, AC010473.5, AL163284.2, AC005534.2, AC010206.8, AC019187.3, |
| | | | | | AB020868.1, AL158819.14, AC007510.6, AC008072.3, AC012377.5, |
| | | | | | AL132774.20, U82670.2, AC020946.4, AL049869.6, AL139415.10, AL023693.25, |
| | | | | | AL163248.2, AC010150.3, AL139405.11, AC025594.5, AL035608.11, |
| | | | | | AL160234.2, AL137786.2, AL035420.15, AF029308.1, AL078646.29, |
| | | | | | AC004921.1, AL157361.6, AL031658.11, AP000842.4, AL031711.30, |
| | | | | | AC002390.1, AC073834.6, AL360179.8, AL133355.12, AC024952.4, AP001972.4, |
| | | | | | AP000108.1, AP000040.1, AL031291.3, AE000661.1, AP001715.1, AC005547.1, |
| | | | | | AL050332.15, Z93942.1, AC073866.16, AC022206.3, AC011228.9, AF334404.1, |
| | | | | | AC007450.1, AP002898.1, AC022073.13, AC005548.1, AC013434.8, AC019210.7, |
| | | | | | AP002342.3, AC078878.20, AL133477.16, AC023484.4, AP000783.4, |
| | | | | | AC007728.4, AC011604.10, AL353802.14, AP001977.4, AC005027.2, |
| | | | | | AC005036.1, AL133346.10, AC004862.1, AL138812.13, AC009490.10, |
| | | | | | AL163280.2, AC025589.20, AL157398.6, AC010282.5, U91328.1, AL360020.15, |
| | | | | | AC019197.7, AL360231.16, AL161422.14. |
| HERHG93 | 37 | 1332320 | 1-909 | 15-923 | AC016722.9, M23161.1, AL031118.21, AB028859.1, X67155.2, AF271371.1, |
| | | | | | AF058696.1, D34614.1, D88547.1, AB002449.1, D50010.1, AB038216.1, |
| | | | | | U79457.1, H12316, AA132078, AA132163, AA135504, AA135505, AA424150, |
| | | | | | AA425387, AA425583, AA468862, AA595016, AA451730, AI032814, AI393086, |
| | | | | | AI623280, AI220994, AI240411, AI271565, AI332512, AI678169, AI686204, AI758161, |
| | | | | | AI766943, AI961133, AW138311, AW207017, AW299404, AV700066, AV714877, |
| | | | | | AV716208, AV721647, AU123619. |
| HESXG41 | 38 | 1306380 | 1-641 | 15-655 | AK027409.1, AC005089.2, AL589786.8, AC005288.1, AF253417.1, AL138849.12. |
| HFKFO58 | 39 | 1306612 | 1-961 | 15-975 | D28137.1, AC010319.7. |
| HFPKB52 | 40 | 1323767 | 1-1764 | 15-1778 | AC004938.2, AC005822.1, AL356257.14, AL139286.13, AJ009612.5, |
| | | | | | AL133246.2, AL136365.9, AC020552.4, AC004967.3, AC007374.6, AC006530.4, |
| | | | | | AL391827.18, AC010458.5, AL391122.9, AC006441.13, AL049780.4, |
| | | | | | AF139813.1, AC068724.7, AC004650.1, AC005722.1, AL355074.5, AC004912.1, |
| | | | | | AC004962.1, AC010150.3, AC022392.4, AL022165.1, AP000901.5, AC009032.7, |
| | | | | | Z95116.1, AC006581.16, U82828.1, AF288742.1, Z95152.1, AL138836.15, |
| | | | | | AL121585.22, AL353748.13, AP001207.3, AL031005.1, AL391259.15, |
| | | | | | AC007055.3, AC009144.5, AL157789.6, AL034421.7, AF334404.1, AL033519.42, |
| | | | | | AL137119.26, AF279660.2, AC007225.2, AJ400877.1, AC007597.3, AL139801.17, |
| | | | | | AP001748.1, AP001718.1, AL163285.2, AL121754.18, AC002563.1, AC002126.1, |
| | | | | | AL049694.9, AC018690.5, AB038653.1, AP000555.1, AL355336.15, |
| | | | | | AL358174.12, AL138878.10, AL359813.23, AL356805.5, AP000032.1, |
| | | | | | AL139353.3, AC009961.11, AL365505.15, AL352978.6, AP001714.1, |
| | | | | | AC004846.2, AC068319.4, AC005369.1, AP000270.1, AC018644.6, AC083876.2, |
| | | | | | AP001727.1, AL022336.1, AC005052.2, AC011462.4, AL121905.23, AC010279.4, |
| | | | | | AL138499.4, AC018639.8, AL442167.1, AL137792.11, Z96074.4, AC005632.2, |
| | | | | | AC037475.9, AC005048.2, AC008551.5, AF205588.1, AL355480.22, AP000039.1, |
| | | | | | AP002788.3, AL359916.8, AL354932.26, AL031311.1, AL158193.13, |
| | | | | | AL031963.40, AC022407.6, AC007880.2, AF131215.1, AC007956.5, AC004491.1, |
| | | | | | AC011485.6, AL136313.27, AL133240.3, AL354750.12, AC023426.29, |
| | | | | | AP000107.1, AP001715.1, AL031597.7, AC090509.1, AL109797.18, AP000104.1, |
| | | | | | AP000133.1, AP000211.1, AC008738.6, AC025166.7, AC007283.3, AC090005.1, |
| | | | | | AL138756.23, AC007263.4, AL391280.15, AC006121.1, AL137139.9, |
| | | | | | AL139021.6, AC005740.1, AL449209.2, AL163612.5, AL118556.4, AC008379.6, |
| | | | | | AC006511.5, AC011471.6, AL136966.27, AC012476.8, AC090942.1, AC002072.1, |
| | | | | | AL096840.25, AL109963.4, AC008555.5, AC023105.7, AC013717.8, |
| | | | | | AL133332.12, AC078846.2, AC011811.42, AL136126.34, AL117337.25, |
| | | | | | AC018523.9, L44140.1, AC007057.3, AL033527.26, AL353653.19, AL354720.14, |
| | | | | | AC090951.1, AC007739.2, AC040163.3, AL008731.1, AL161937.13, |
| | | | | | AL445435.11, AL390866.14, AL035420.15, AL138807.12, AC066597.4, |
| | | | | | AL049874.3, AL049611.24, AC016894.7, AC007899.3, AL122023.3, AC005519.3, |
| | | | | | AL139092.12, AC011816.17, AC009236.4, AC018636.4, AL022725.8, Z93015.9, |
| | | | | | AL450169.1, AL133453.3, AC001228.1, AL117258.4, AC010319.7, AC005180.2, |
| | | | | | AC018641.3, AL117692.5, AL133258.16, AC000353.27, AP001711.1, |
| | | | | | AC008392.6, AC011491.5, AC007540.3, AC005082.3, Z95114.19, AC025271.7, |
| | | | | | U91321.1, AL034420.16, AL354735.14, AC008733.7, AC004383.1, AD000092.1, |
| | | | | | AC090937.1, AC004826.3, AP001754.1, AL139321.28, AL031733.3, AC004386.1, |
| | | | | | AL117336.22, AC073542.4, AC011005.7, AC022816.15, AC022468.5, |
| | | | | | AC009220.10, AL050321.11, Z84480.1, AC005730.1, AC005412.6, AL035423.4, |
| | | | | | AC084864.2, AC025262.27, AL357752.19, AL158052.10, AL163278.2, |
| | | | | | AF031078.1, AC008372.6, AC002432.1, AL121601.13, AC079907.25, |
| | | | | | AL449217.1, AC010205.5, AL391724.7, AL118559.6, AC007277.2, AC002996.1, |
| | | | | | AC078962.30, AF030876.1, AC020913.6, AL132777.4, AC007773.1, AP001716.1, |
| | | | | | AP001712.1, AL109965.34, AL445669.9, AP003439.2, AL138759.20, |
| | | | | | AL049843.18, AL136179.15, AC078818.19, AL135749.3. |
| HGARX38 | 41 | 1306709 | 1-502 | 15-516 | AC002301.1. |
| HMAGO59 | 42 | 1336115 | 1-1305 | 15-1319 | U83171.1, AC004382.1, U83239.1. |
| HMTSX03 | 43 | 1335783 | 1-1542 | 15-1556 | M61856.1, M61853.1, M61854.1, Y00498.1, S53046.1, M17397.1, M17398.1, |
| | | | | | M21941.1, M21942.1, L07093.1, M61858.1, X65962.1, X51535.1. |
| HMTUZ60 | 44 | 1306331 | 1-981 | 15-995 | AC003049.1, AC022596.9. |
| HNFKC14 | 45 | 1306655 | 1-394 | 15-408 | AP001728.1, AC025589.20, Z95115.1, Z85986.1, AC003684.1, AP000011.2, |
| | | | | | AC004887.2, AF334400.1, AL109758.2, AC036103.8, AC005874.3, AF134471.1, |
| | | | | | U96629.1. |
| HNSQN50 | 46 | 1322736 | 1-2083 | 15-2097 | None |
| HNSUM63 | 47 | 1306687 | 1-988 | 15-1002 | AC009946.2, AL590440.1, AA603247, AA873561, AA918832, AA923076, |
| | | | | | AA953219, AA999716, AI244033, AI284406, AI766925, AI733127, AI889751, |
| | | | | | AW169033. |
| HNSWV68 | 48 | 1306700 | 1-2125 | 15-2139 | D87444.1, AL049539.21, T58139, T63077, R21402, R21940, R22588, R46499, |
| | | | | | R52096, R52191, R46499, H17104, H17205, H64855, H65453, N20109, N25476, |
| | | | | | N42586, N94480, W94067, W94068, AA428538, AA287330, AA287465, AA470698, |
| | | | | | AA480986, AA481002, AA505288, AA524286, AA551238, AA584884, AA570059, |
| | | | | | AA873767, AA921717, D81182, AI085523, AI094613, AI096869, AA095376, |
| | | | | | AA291405, AA291836, AA292243, AA400811, AA401003, AA401670, AA480134, |
| | | | | | AA482101, AA481480, AA481718, AA665659, AA770113, AA770298, AA853935, |
| | | | | | AA789159, AI034063, AI040574, AI086723, Z40719, Z44982, F11692, F09352, |
| | | | | | AA953460, AI146352, AI263664, AI271977, AI356823, AI357394, AI359797, AI360188, |
| | | | | | AI360977, AI361016, AI362874, AI364237, AI445988, AI421557, AI421759, AI566341, |
| | | | | | AI582908, AI423481, AI193950, AI598125, AI338746, AI340064, AI613427, AI648405, |
| | | | | | AI863909, AI888216, AI913894, AI922132, AI922424, AI922862, AI936957, |
| | | | | | AW005778, AW007814, AW054979, AW087313, AW057831, AW071542, AW131152, |
| | | | | | AW166753, AW188664, AW191028, BF057036, BF447091, BG056533, BG060060, |
| | | | | | BF939399, BG680955. |
| HOC2T95 | 49 | 1324137 | 1-926 | 15-940 | AC002301.1, AL050393.1, S78214.1, AL133640.1, AF090900.1, AL157431.1, |
| | | | | | AL512733.1, AL442072.1, AF090943.1, AF090934.1, AL133016.1, AL389978.1, |
| | | | | | AB055303.1, BC008387.1, AF078844.1, BC007021.1, BC008417.1, AB056809.1, |
| | | | | | AF125949.1, AB048953.1, AL049938.1, AL136586.1, AL442082.1, AL050146.1, |
| | | | | | AL137527.1, AJ242859.1, BC008365.1, AL080060.1, AL110196.1, AL136787.1, |
| | | | | | AL117457.1, AL117460.1, AF090901.1, AF218014.1, AB056420.1, AK026608.1, |
| | | | | | AL133606.1, AF104032.1, AF090903.1, AL110221.1, BC008488.1, AL390167.1, |
| | | | | | AL359596.1, AL122050.1, AL049452.1, AK000212.1, AB050510.1, AB049758.1, |
| | | | | | AL136789.1, AF106862.1, BC003687.1, AL359601.1, BC003683.1, AF111847.1, |
| | | | | | AB047615.1, AL133075.1, AL050116.1, AB063046.1, AL162006.1, AK025339.1, |
| | | | | | AL136749.1, AB063070.1, AL136892.1, AB060887.1, AK026741.1, AB060916.1, |
| | | | | | U42766.1, AB048964.1, AF090896.1, AK026865.1, AK025084.1, BC001967.1, |
| | | | | | AL050149.1, AL050108.1, AK027868.1, AB063008.1, Y16645.1, AB019565.1, |
| | | | | | AL133258.16, AB047801.1, AB056768.1, AL080137.1, AL162083.1, AL096744.1, |
| | | | | | AB055361.1, AL049466.1, AK026045.1, AK025958.1, AB060908.1, AL049314.1, |
| | | | | | AL122093.1, BC006807.1, AL136799.1, AL133557.1, AF219137.1, AL050277.1, |
| | | | | | AL080124.1, AL136844.1, AL133080.1, AK026855.1, AL389982.1, AL133565.1, |
| | | | | | AL122121.1, AL137283.1, AK026744.1, AB060912.1, AL049430.1, AF097996.1, |
| | | | | | AL122123.1, AF146568.1, AL133093.1, AB060863.1, AF271350.1, AL512746.1, |
| | | | | | AL117394.1, AL050138.1, AF125948.1, AL136768.1, AP001873.3, AL137459.1, |
| | | | | | AK027096.1, AL137557.1, AK000618.1, AL137550.1, AF091084.1, U91329.1, |
| | | | | | BC002733.1, AK000137.1, AK025772.1, AK026542.1, AK026784.1, AF207829.1, |
| | | | | | AK000083.1, AL359615.1, AC002464.1, AK025092.1, AL359618.1, AL121952.18, |
| | | | | | AB060826.1, AB062938.1, AL512719.1, AL359941.1, AB048974.1, AK026592.1, |
| | | | | | AK026533.1, AL512718.1, AF091512.1, AL133560.1, AC007390.3, X82434.1, |
| | | | | | AK000445.1, AB055315.1, AB048954.1, AL353802.14, BC004556.1, BC006195.1, |
| | | | | | AL049382.1, BC001045.1, AB055368.1, AK000614.1, AC008491.6, AL512754.1, |
| | | | | | AB060825.1, AL110225.1, AK026504.1, AK026452.1, AL049300.1, AK026927.1, |
| | | | | | AK024538.1, AB055366.1, AC026464.6, AK000323.1, AK026480.1, AC009364.8, |
| | | | | | AC007375.6, AF177336.1, AL512689.1, AK026353.1, AL512454.6, AL445236.22, |
| | | | | | AL390840.17, BC002839.1, AL353940.1, AK027113.1, AC002467.1, AB051158.1, |
| | | | | | BC004951.1, AL117583.1, AK026959.1, AL117585.1, AK000652.1, AK026647.1, |
| | | | | | AK026534.1, AB060852.1, AK026583.1, AL499604.9, S61953.1, AB052191.1, |
| | | | | | AC004686.1, AL513015.6, AK026532.1, AK025491.1, AK024524.1, AC026787.4, |
| | | | | | AF348209.1, AL022147.3, AK000432.1, AC005522.2, AC006371.2, AC004690.1, |
| | | | | | U95739.1, AL117435.1, AL136928.1, AL050024.1, AC007298.17, AF061943.1, |
| | | | | | AB047904.1, AC007172.6, AK026642.1, AL162062.1, AL049464.1, BC008070.1, |
| | | | | | AL138767.15, AK026086.1, BC008899.1, AF225424.1, AC011475.6, |
| | | | | | AL353594.13, AC006336.4, AB056421.1, AL133344.28, AA828206, AA937899, |
| | | | | | T24456, AI638107, AI633243, AI732905, AW196509, AW594156, AW594190. |
| HODNV05 | 50 | 1306656 | 1-691 | 15-705 | AC006130.1, AC078962.30, AJ009611.6. |
| HPDSA48 | 51 | 1332325 | 1-1004 | 15-1018 | AB030001.1, AJ009611.6, AC006538.1, AB020860.1, AK026924.1, AL359623.1, |
| | | | | | AK027111.1, AF261134.1, AB060832.1, X82434.1, AC012502.3, AK026626.1, |
| | | | | | BC009395.1, AF183393.1, BC000077.1, AK024622.1, AL136767.1, BC003602.1, |
| | | | | | AC007383.4, AL136844.1, AK000653.1, AF056191.1, AL117435.1, AL136768.1, |
| | | | | | AC008592.4, AL133565.1, BC006480.1, BC007460.1, AK027160.1, BC008780.1, |
| | | | | | AB047904.1, AK000432.1, BC004899.1, AB060873.1, BC002355.1, AB049629.1, |
| | | | | | AB055303.1, AB060887.1, BC002473.1, AF352728.1, BC008078.1, AJ010277.1, |
| | | | | | AL389935.1, AK027136.1, AF132676.1, AF061836.1, AL136754.1, BC006440.1, |
| | | | | | BC008717.1, AL110221.1, AC004987.2, BC004431.1, BC001964.1, AF115392.1, |
| | | | | | AL117460.1, AB046642.1, AL512718.1, BC001470.1, BC003687.1, BC002539.1, |
| | | | | | AF141289.1, AB056421.1, BC007456.1, AL512746.1, AL137711.1, AF274348.1, |
| | | | | | AF274347.1, AF303581.1, AF178432.1, AL389978.1, AK026583.1, BC004530.1, |
| | | | | | AK027204.1, BC007571.1, AB060852.1, AL137547.1, AL353940.1, AL136864.1, |
| | | | | | AL117629.1, AB063100.1, AL133619.1, AL136784.1, AB063088.1, AL137658.1, |
| | | | | | BC008649.1, BC004925.1, BC006164.1, AL110197.1, BC000570.1, S77771.1, |
| | | | | | AL035458.35, AF094480.1, BC004310.1, AB062750.1, AL137463.1, BC003410.1, |
| | | | | | AJ406939.1, AK027081.1, AK024545.1, BC008836.1, AB050410.1, AB056427.1, |
| | | | | | AB060837.1, AB050421.1, AF217987.1, AK026613.1, AK025435.1, BC000714.1, |
| | | | | | AL133016.1, AL137550.1, AB062978.1, AL122123.1, AK026534.1, BC008382.1, |
| | | | | | BC007326.1, AF110329.1, AL122121.1, AF067420.1, AF120268.1, BC002948.1, |
| | | | | | AF132730.1, BC002476.1, AF061943.1, AL136540.1, BC002399.1, BC007280.1, |
| | | | | | AL133558.1, AB048888.1, BC003587.1, AF232009.1, BC001963.1, AL390184.1, |
| | | | | | BC006198.1, BC007522.1, AK000206.1, AF091084.1, BC002457.1, AC084881.19, |
| | | | | | BC005151.1, AF143723.1, AL359596.1, AB055328.1, BC006159.1, AB047878.1, |
| | | | | | AB060825.1, AL137533.1, AF044323.1, AL133010.1, S76508.1, AK000486.1, |
| | | | | | AL050170.1, S61953.1, AL162002.1, BC001418.2, AL050015.1, AF090900.1, |
| | | | | | AK024594.1, AK024538.1, AF358829.1, AF090943.1, BC007207.1, BC001236.1, |
| | | | | | AK027129.1, BC002839.1, AL080154.1, AK000618.1, AK025349.1, BC000713.1, |
| | | | | | AK000391.1, AF321617.1, BC001844.1, BC008417.1, AK026556.1, BC006807.1, |
| | | | | | BC004368.1, AK026591.1, AB055805.1, AK026542.1, AB019565.1, AL110171.1, |
| | | | | | Y10080.1, AL117648.1, BC007920.1, L19437.2, BC004883.1, AK026894.1, |
| | | | | | AL137557.1, BC003591.1, BC002519.1, AL049382.1, AK025099.1, BC007255.1, |
| | | | | | AL117416.1, AL512733.1, AF285836.1, AK024974.1, AK025798.1, AL137529.1, |
| | | | | | AL136893.1, AL117457.1, AL157431.1, AL353956.1, BC006087.1, AL136787.1, |
| | | | | | AL133049.1, AL137548.1, BC006195.1, AF285167.1, AL110280.1, AC026464.6, |
| | | | | | AF353396.1, BC008070.1, BC008875.1, AF114818.1, AK025524.1, U57352.1, |
| | | | | | AL080126.1, AK024855.1, AF026816.2, AP000247.1, AB049900.1, AL157464.1, |
| | | | | | AL161953.1, AK000421.1, BC002386.1, AL080162.1, BC001655.1, AL133072.1, |
| | | | | | AL136882.1, AK026506.1, BC005835.1, AF078844.1, AL136928.1, BC002444.1, |
| | | | | | AF073483.1, AK000247.1, AK000655.1, AL359583.1, H98105, AA582640, |
| | | | | | AA974188, AA983252, AA496573, AA780868, AI091038, AI122629, AA702199, |
| | | | | | AI216250, AI568599, AI570624, AI129678, AI192822, AI650947, AI190095, AI275630, |
| | | | | | AI669329, AI677742, AI682359, AI685600, AI685762, AI818189, AI826260, AI866170, |
| | | | | | AI887425, AI888033, AI872168, AI872169, AI872176, AI810253, AI926066, AI972843, |
| | | | | | AW117981, AW078481, AW263965, AW172681, AW292157, AW450763, BF434822, |
| | | | | | BF439731, BF221737. |
| HSKIT24 | 52 | 1320220 | 1-2032 | 15-2046 | U90441.1, AC034220.4, AC063976.4, L81778.1, AC000960.1, L81779.1, |
| | | | | | L77044.1, L81777.1, AC002195.1, L81780.1. |
| HSVAA83 | 53 | 1320217 | 1-1169 | 15-1183 | BC009016.1, AF218034.1, BC008387.1, AL117649.1, AB060893.1, BC000725.1, |
| | | | | | BC008719.1. |
| HUTJT76 | 54 | 1322752 | 1-1028 | 15-1042 | None |
| HUVHZ75 | 55 | 1336588 | 1-2880 | 15-2894 | AL110202.1, AP001830.4, AL050161.1, AL137643.1, AK026572.1, AF090900.1, |
| | | | | | AF104032.1, AL110221.1, AL136787.1, BC008417.1, AK026865.1, AB049758.1, |
| | | | | | AL050393.1, AB055303.1, AF106862.1, BC008365.1, BC003687.1, S78214.1, |
| | | | | | AF090901.1, BC008387.1, AF090934.1, AL136892.1, AL389978.1, AB060916.1, |
| | | | | | AL049452.1, AB048953.1, AL133016.1, AB056420.1, AL359596.1, AL359601.1, |
| | | | | | AL442082.1, AL136586.1, AB060887.1, AL117457.1, BC008488.1, AL080060.1, |
| | | | | | BC003683.1, AL390167.1, BC007021.1, AL133640.1, BC001967.1, AL512733.1, |
| | | | | | AF090903.1, AF111847.1, AF078844.1, AL049938.1, AJ242859.1, AK026608.1, |
| | | | | | AL442072.1, AL110196.1, AF218014.1, AL117460.1, AF125949.1, AL157431.1, |
| | | | | | AL133606.1, AF090943.1, AL050149.1, AL137527.1, AK025339.1, AL050146.1, |
| | | | | | AL122050.1, AK000212.1, AL136749.1, AB048964.1, AL136789.1, AL133075.1, |
| | | | | | AL050116.1, AF090896.1, AB056768.1, AL162083.1, AL050108.1, AB063070.1, |
| | | | | | AK026741.1, AB047615.1, AB063046.1, U42766.1, AK027868.1, AK026045.1, |
| | | | | | AL133557.1, AB055361.1, AL136799.1, AB019565.1, AB056809.1, AB047801.1, |
| | | | | | BC006807.1, AL162006.1, AL049314.1, AK025084.1, AB063008.1, AL049466.1, |
| | | | | | AL080124.1, AK025958.1, AK025092.1, AK026855.1, AF219137.1, AL122093.1, |
| | | | | | AL137283.1, AL096744.1, AL389982.1, AB060912.1, AL080137.1, BC002733.1, |
| | | | | | AB060863.1, AL137557.1, AB060908.1, AL133093.1, AK026744.1, AL050277.1, |
| | | | | | AL049430.1, AL121656.2, AL512746.1, AL136844.1, AL122121.1, AK027096.1, |
| | | | | | AL136768.1, AK026533.1, AL137459.1, AF097996.1, Y16645.1, AL133080.1, |
| | | | | | AF146568.1, AL359941.1, AL133565.1, AB056421.1, AL110225.1, AK000618.1, |
| | | | | | AK025772.1, AL122123.1, AL512718.1, AL512719.1, AB062938.1, AF125948.1, |
| | | | | | AL117394.1, AL133560.1, AK000083.1, AL353940.1, U91329.1, AL359618.1, |
| | | | | | AF271350.1, AL050138.1, AK027113.1, AB048954.1, AK026784.1, AK000137.1, |
| | | | | | BC004556.1, AL137550.1, X82434.1, AF207829.1, AL512754.1, AB055368.1, |
| | | | | | AF091084.1, AK000652.1, AB060826.1, AK026532.1, BC006195.1, AB051158.1, |
| | | | | | AL117583.1, AL050024.1, AK026592.1, AB055315.1, AB060825.1, AB047904.1, |
| | | | | | BC001045.1, AK024538.1, AB055366.1, AK026647.1, AK026480.1, AK000445.1, |
| | | | | | AK000614.1, AK026927.1, BC004951.1, AB060852.1, AK026583.1, S61953.1, |
| | | | | | AF225424.1, AB052191.1, AK026504.1, AK026452.1, AL117435.1, AK000323.1, |
| | | | | | AL136928.1, AK026086.1, AL512689.1, AL049300.1, AL117585.1, AK026959.1, |
| | | | | | AL049382.1, Z82022.1, AK026542.1, AK025391.1, AF177336.1, AK025491.1, |
| | | | | | AK027164.1, AL122098.1, AK025484.1, BC008070.1, AL359615.1, AK025414.1, |
| | | | | | AF183393.1, AK026534.1, AL122110.1, AK000432.1, AF056191.1, AB052200.1, |
| | | | | | AL049464.1, AL133258.16, AK025967.1, BC008485.1, AK026630.1, AK026353.1, |
| | | | | | BC002839.1, BC008899.1, AL137271.1, AL136845.1, AB049892.1, AK026528.1, |
| | | | | | AC010149.8, AK027204.1, BC007199.1, AL133113.1, AL512684.1, X72889.1, |
| | | | | | AL136786.1, AK026600.1, AK026642.1, AK025632.1, AK025524.1, AF095901.1, |
| | | | | | AL512761.1, AK024524.1, AL512750.1, AL359583.1, AL137538.1, AL137463.1, |
| | | | | | AK024588.1, AL080127.1, BC006164.1, AK000718.1, AL512765.1, AL136805.1, |
| | | | | | AK026506.1, AK026593.1, AK026597.1, AB050510.1, AK026947.1, AK000647.1, |
| | | | | | AC007390.3, AB063084.1, AL049283.1, R49723, R49724, R52544, R52600, R49724, |
| | | | | | R68515, R78787, R79089, H02044, H29260, H29343, N21066, N25690, N27897, |
| | | | | | N67265, W19441, N90319, AA076291, AA102126, AA099530, AA129410, AA136350, |
| | | | | | AA136546, AA164182, AA164181, AA232961, AA234256, AA243721, AA458612, |
| | | | | | AA484174, AA505888, AA506529, AA514339, AA583089, AA595793, AA603778, |
| | | | | | AA632027, AA569113, AA568266, AA659318, AA664617, AA688238, AA720676, |
| | | | | | AA732663, AA747641, AA761101, AA765492, AA767307, AA806595, AA804363, |
| | | | | | AA828510, AA856846, AA912059, AA954740, AA970634, N56462, C17292, |
| | | | | | AA170856, D12446, D11946, AA485981, AA490633, AA585455, AA585157, |
| | | | | | AA585156, AA628942, AA668828, AA669143, AA843729, T25907, AA169890, |
| | | | | | AA169889, AA161521, AA773296, AA927841, AA993063, AI026753, AI057517, |
| | | | | | Z25910, T24530, T24599, T19047, T48530, D11751, AI246013, AI251894, AI147752, |
| | | | | | AI274471, AI274549, AI281172, AI289293, AI302808, AI302899, AI304709, AI369056, |
| | | | | | AI375616, AI346984, AI446009, AI468967, AI478107, AI421609, AI571038, AI625621, |
| | | | | | AI189577, AI219326, AI239503, AI239965, AI539064, AI587240, AI338428, AI521440, |
| | | | | | AI679525, AI679965, AI683661, AI683806, AI689408, AI689895, AI695542, AI695816, |
| | | | | | AI697210, AI744174, AI744987, AI745048, AI758736, AI762744, AI697362, AI701079, |
| | | | | | AI827208, AI864041, AI865984, AI919545, AI922012, AI950576, AW008716, |
| | | | | | AI979056, AI979098, AI986117, AW057772, AW084429, AW103412, AW105692, |
| | | | | | AW118428, AW149891, AW150183, AW151150, AW166806, AW168356, AW168357, |
| | | | | | AW169184, AW196703, AW264611, AW195114, AW293994, AW338318, AW338402, |
| | | | | | AW628110, AW662191, AW771846, AW780212, BF732961, AW873008, BG743130, |
| | | | | | BG743471, BG913281, AV682870, BE867190, BE876707, AV712848, AV713160, |
| | | | | | AV713747, AV716778, AV717887, AV717912, AV725244, AV726775, AV728094, |
| | | | | | AV729216, AV755849 |
| HVAQO59 | 56 | 1318530 | 1-735 | 15-749 | AC005361.1, BC008365.1, BC003687.1, AB049758.1, BC008387.1, AF218014.1, |
| | | | | | BC008488.1, AL117457.1, AB019565.1, BC008417.1, AL442082.1, AF111847.1, |
| | | | | | AL359596.1, AL049452.1, AL389978.1, AB063070.1, AK025084.1, AF125949.1, |
| | | | | | AL136787.1, AL122050.1, AL133606.1, AK027868.1, AL157431.1, AL050393.1, |
| | | | | | AF090934.1, AK025958.1, AL133075.1, AL162083.1, AL110196.1, AL049314.1, |
| | | | | | AK026865.1, AF078844.1, AL080060.1, AL136892.1, AL136749.1, AF090943.1, |
| | | | | | AB048964.1, AL390167.1, AL512733.1, AL442072.1, BC003683.1, AB047615.1, |
| | | | | | AB063046.1, AB056420.1, AF090903.1, AL050146.1, S78214.1, AF104032.1, |
| | | | | | AL359601.1, AB056768.1, AB048953.1, AK025339.1, AL136799.1, AB055303.1, |
| | | | | | AL110221.1, AB060887.1, AL133016.1, BC007021.1, AL050116.1, AL136586.1, |
| | | | | | AF090901.1, AL133640.1, AL050277.1, AB047801.1, AF090896.1, AL137527.1, |
| | | | | | AJ242859.1, AL117460.1, AL050149.1, U42766.1, AB055361.1, AF106862.1, |
| | | | | | AK026741.1, AB060916.1, AL136789.1, AK026045.1, AF090900.1, AL050108.1, |
| | | | | | AB063008.1, AF219137.1, AL122093.1, AK026608.1, AB050510.1, AK000618.1, |
| | | | | | BC001967.1, AL162006.1, AL049466.1, AK026744.1, AL080137.1, AL049938.1, |
| | | | | | AL137557.1, AK000212.1, BC006807.1, AL080124.1, AL133557.1, AL122121.1, |
| | | | | | AL137283.1, AB060863.1, AL122123.1, AK026855.1, AL389982.1, AK027096.1, |
| | | | | | AL136844.1, AL133093.1, AK000137.1, AB060912.1, AB056809.1, AL133565.1, |
| | | | | | BC002733.1, AL136768.1, AF146568.1, AF207829.1, AL133080.1, AL512754.1, |
| | | | | | AK026784.1, AK026534.1, AK026533.1, Y16645.1, AL096744.1, AK025772.1, |
| | | | | | AK026542.1, AK026927.1, AB051158.1, AL512718.1, AL512719.1, AF091084.1, |
| | | | | | AK026583.1, U91329.1, AL512746.1, AF125948.1, AL117583.1, AB060908.1, |
| | | | | | AB060825.1, AL050138.1, AL137459.1, AB062938.1, AK000083.1, BC001045.1, |
| | | | | | BC004556.1, AL117394.1, AL359941.1, AK000445.1, AB048954.1, AK025092.1, |
| | | | | | AL359618.1, AF271350.1, X82434.1, AL049464.1, AL359615.1, AK024538.1, |
| | | | | | AK026647.1, AK026452.1, AL110225.1, AL137550.1, AB055368.1, AK026592.1, |
| | | | | | BC006195.1, AB055366.1, AB060826.1, AL117585.1, AL353940.1, AL133560.1, |
| | | | | | AB055315.1, AB060852.1, AB047904.1, AK000652.1, AK025491.1, AL049382.1, |
| | | | | | AF225424.1, BC008070.1, AF097996.1, BC002839.1, AK027113.1, AB052191.1, |
| | | | | | AL136845.1, AK026959.1, AK026532.1, U80742.1, AK026504.1, AL049430.1, |
| | | | | | AL136928.1, AK026086.1, AL512689.1, AK026642.1, AK000323.1, AK025967.1, |
| | | | | | AK026353.1, AL122098.1, BC007199.1, BC004951.1, AF260566.1, AL049300.1, |
| | | | | | AK027204.1, BC008382.1, AL133258.16, AK000614.1, AK025391.1, AL050024.1, |
| | | | | | AK026480.1, BC008899.1, AL136786.1, AF177336.1, AK000432.1, BC006164.1, |
| | | | | | AL117435.1, AK027164.1, AL512765.1, AK027116.1, AB056421.1, Z82022.1, |
| | | | | | AB060929.1, AL133113.1, AK024524.1, AK025414.1, AB049892.1, AK026651.1, |
| | | | | | AK026947.1, BC008485.1, S61953.1, AK000647.1, AK025524.1, AF183393.1, |
| | | | | | AB052200.1, AL359622.1, AB060883.1, AK027213.1, AL353625.5, AB063093.1, |
| | | | | | AL137271.1, AL359583.1, BC008983.1, AL122110.1, AK026526.1, AL049283.1, |
| | | | | | BC008280.1, X72889.1, AL512684.1, AF348209.1, BC005890.1, AB055374.1, |
| | | | | | AL137648.1, AL137538.1, AL162062.1, AL137463.1, AK025484.1, AK026600.1, |
| | | | | | AP001666.1, AL080127.1, AK025906.1, AC009364.8. |
| HWHPA16 | 57 | 1306589 | 1-411 | 15-425 | AD001502.1, AK025708.1. |
| HYCAD48 | 58 | 1334177 | 1-1293 | 15-1307 | None |
| HHFZF42 | 59 | 1305981 | 1-462 | 15-476 | AC008753.8, AC008440.8, AK027693.1. |
| HHAQY41 | 60 | 1306357 | 1-583 | 15-597 | None |
| HNSRC60 | 61 | 1323801 | 1-1580 | 15-1594 | AC005621.1, AC005382.1. |
| HFDUT84 | 62 | 1315930 | 1-1188 | 15-1202 | AL121929.17, AB007878.1, Z92844.1, AJ244003.1, AJ244004.1, AJ244005.1, |
| | | | | | AL360230.20, D78345.1, AJ244007.1, AL389982.1, D13316.1, AL049452.1, |
| | | | | | AL359601.1, AK024538.1, AB055303.1, AB060887.1, AL136799.1, AL133075.1, |
| | | | | | AF090903.1, AL162062.1, BC008070.1, AL137463.1, AL049466.1, AL133565.1, |
| | | | | | BC002733.1, AL136892.1, AB025273.1, AL136768.1, AL133640.1, AB060916.1, |
| | | | | | AL512719.1, D50010.1, BC003683.1, AJ242859.1, AL512761.1, BC007021.1, |
| | | | | | AK027204.1, AL136749.1, AB048953.1, AL512754.1, Z82022.1, AK026947.1, |
| | | | | | AB055368.1, AL133080.1, AL049382.1, AF146568.1, AL050277.1, AL117460.1, |
| | | | | | AK000647.1, BC008417.1, AB047904.1, AK026532.1, AL512718.1, AL353940.1, |
| | | | | | AL359941.1, X82434.1, AL137550.1, AK027096.1, AK026045.1, AL137271.1, |
| | | | | | AK025084.1, BC008387.1, AL122098.1, AL122093.1, AL117435.1, AK026504.1, |
| | | | | | AB055361.1, AL512684.1, BC006807.1, AF225424.1, AF177336.1, BC008280.1, |
| | | | | | AK026353.1, AB056420.1, AL050116.1, AK000323.1, AK026865.1, AK026592.1, |
| | | | | | AK027868.1, AK026855.1, AK026583.1, AB063008.1, AL117583.1, AK025092.1, |
| | | | | | BC008485.1, AL117585.1, AK026452.1, AL133016.1, BC008365.1, AL122121.1, |
| | | | | | AL122123.1, BC003687.1, AL389978.1, BC002839.1, Y16645.1, AL110221.1, |
| | | | | | BC007199.1, AL133072.1, U94592.1, AB063070.1, AK025339.1, AK026744.1, |
| | | | | | AB060863.1, BC008488.1, AB051158.1, AF090896.1, AL136845.1, AF078844.1, |
| | | | | | AK024524.1, AL136928.1, AL162083.1, AL133093.1, AB050510.1, AL359583.1, |
| | | | | | AK025414.1, AF207829.1, AK027164.1, AB060825.1, AL359615.1, AL080124.1, |
| | | | | | AK000652.1, BC008382.1, AB048964.1, AL050024.1, AK000432.1, AF218014.1, |
| | | | | | AK000137.1, S78214.1, AB048954.1, AK026784.1, AK000083.1, AB063084.1, |
| | | | | | AL136789.1, AK000718.1, AL390167.1, AK026534.1, U80742.1, AL080060.1, |
| | | | | | AK027113.1, AK026542.1, AK026086.1, AL122050.1, AB047615.1, AK025958.1, |
| | | | | | AL136844.1, AL137459.1, AL512746.1, AL137538.1, AB047801.1, AB062938.1, |
| | | | | | AL133557.1, AK026647.1, AL117457.1, AB049758.1, AL136586.1, AL080137.1, |
| | | | | | AB056768.1, AL137527.1, AF106862.1, BC006195.1, X72889.1, AL122049.1, |
| | | | | | AL049938.1, AL157431.1, AF125949.1, AF090934.1, AL049300.1, AL110225.1, |
| | | | | | BC001967.1, BC004951.1, AF183393.1, AB060852.1, AF090900.1, AK025524.1, |
| | | | | | AL133560.1, AF260566.1, BC004556.1, AB055315.1, AF091084.1, AB052191.1, |
| | | | | | AK026533.1, AK026526.1, AB060826.1, AF090943.1, AL049464.1, BC008899.1, |
| | | | | | AL359618.1, AK026959.1, AB056421.1, AB063046.1, AL512733.1, BC001045.1, |
| | | | | | AL050149.1, AK026927.1, AF125948.1, AL442082.1, AK000618.1, U42766.1, |
| | | | | | AL136787.1, AL122110.1, AB060912.1, AK025967.1, AL110196.1, AL049430.1, |
| | | | | | AL359596.1, AK026741.1, AB060908.1, AK026608.1, AL162006.1, AK026630.1, |
| | | | | | AK025632.1, AF219137.1, AB052200.1, AK025772.1, AL050108.1, AF090901.1, |
| | | | | | AL050138.1, AL050393.1, AB019565.1, BC008983.1, AF104032.1, AL137557.1, |
| | | | | | AK000445.1, AL049314.1, AB055366.1, AK025491.1, AL512689.1, AL050146.1, |
| | | | | | AF111847.1, AL442072.1, AL117394.1, AL133606.1, AK026629.1, AL080127.1, |
| | | | | | AK027116.1, AL137521.1, AK025391.1, AK025484.1, BC006412.1, AL133113.1, |
| | | | | | AL136786.1, AL137648.1, AL096744.1, AL512765.1, AF061943.1, U91329.1, |
| | | | | | AK026642.1. |
| HHAIS21 | 63 | 1335782 | 1-880 | 15-894 | AC020983.7, AC013429.12. |
| HHMQL78 | 64 | 1315932 | 1-958 | 15-972 | AL157431.1, BC008070.1, AF353396.1, AL137560.1, AL050155.1, AF155827.1, |
| | | | | | BC006164.1, AL389935.1, AF218023.1, BC007255.1, AK000137.1, AL117435.1, |
| | | | | | AF091084.1, AK024545.1, AL136767.1, AJ242859.1, AL110221.1, AF090903.1, |
| | | | | | D83032.1, BC008365.1, BC003687.1, AB060825.1, AL122093.1, BC004368.1, |
| | | | | | U38847.1, AL359624.1, L19437.2, U77594.1, S77771.1, AL049324.1, |
| | | | | | AB063100.1, U80742.1, BC003120.1, BC009395.1, BC004899.1, AB060837.1, |
| | | | | | BC004951.1, AL050172.1, AL136635.1, AB062978.1, AB048994.1, BC004925.1, |
| | | | | | AL117416.1, AK024622.1, AL137521.1, AB049848.1, BC006509.1, BC002535.1, |
| | | | | | BC006525.1, AL137558.1, BC004215.1, AK024538.1, S76508.1, AL137539.1, |
| | | | | | AB062942.1, BC002519.1, AL136792.1, AL122098.1, BC005890.1, AF061795.1, |
| | | | | | AF151685.1, AL117440.1, AL137665.1, BC001470.1, BC004960.1, AL512750.1, |
| | | | | | AF090943.1, BC002750.1, AL049452.1, AL359601.1, AL136893.1, AL136768.1, |
| | | | | | AF162270.1, BC008751.1, AL136892.1, AF057300.1, AF057299.1, AL390154.1, |
| | | | | | AB049900.1, AK026797.1, BC006410.1, BC006159.1, BC002523.1, BC008078.1, |
| | | | | | AL137656.1, BC008893.1, AL137548.1, AL110280.1, AK024546.1, AF061943.1, |
| | | | | | BC008780.1, AF073483.1, AB050510.1, AK025958.1, AB050421.1, AK026613.1, |
| | | | | | AB060916.1, AL389957.1, AK025524.1, AL133016.1, AL110225.1, AL353956.1, |
| | | | | | BC001844.1, BC006412.1, AL136882.1, AK027136.1, X72889.1, X53587.1, |
| | | | | | AL137283.1, BC002839.1, AF205073.1, AK026164.1, BC006103.1, AL080154.1, |
| | | | | | BC007926.1, AK000212.1, AK027146.1, BC004244.1, AL359615.1, AF056191.1, |
| | | | | | AL110222.1, BC004943.1, AB048964.1, L30117.1, AB060903.1, BC005854.1, |
| | | | | | BC001056.1, AJ012755.1, AK026593.1, AC002467.1, AB049892.1, BC008899.1, |
| | | | | | AK026959.1, AF114818.1, BC007680.1, AK026526.1, AL157482.1, BC004264.1, |
| | | | | | AK026631.1, BC000348.1, AL136799.1, AL136789.1, BC003105.1, BC009403.1, |
| | | | | | AK000247.1, AB050410.1, BC004362.1, U55017.1, AB047878.1, X67688.1, |
| | | | | | AL117578.1, AF352728.1, AL136781.1, AL359620.1, AL136845.1, BC007199.1, |
| | | | | | AL137292.1, AY034001.1, Y10080.1, AF026816.2, AK024594.1, AF320073.1, |
| | | | | | AL050277.1, BC002359.1, BC008488.1, AK026597.1, BC004556.1, AB056427.1, |
| | | | | | AK026626.1, AB048954.1, AL137538.1, AK026649.1, AL359623.1, AF262032.1, |
| | | | | | AL137550.1, AL133010.1, BC006807.1, AF285167.1, AK026534.1, AB051158.1, |
| | | | | | AK000418.1, AF028823.2, AL357195.1, AK026744.1, BC001964.1, AK027213.1, |
| | | | | | AB046642.1, AB063079.1, AK026855.1, AK025410.1, AB063077.1, BC003656.1, |
| | | | | | BC008417.1, AL117394.1, AL137480.1, AK026647.1, AK024570.1, AK026629.1, |
| | | | | | AL080124.1, AK026542.1, AF169154.1, BC004905.1, AL133637.1, X82434.1, |
| | | | | | BC004883.1, AK026504.1, AK000603.1, BC002643.1, AL162003.1, AL133640.1, |
| | | | | | AK027221.1, AF132730.1, AL117457.1, BC002466.1, AF125948.1, AL353940.1, |
| | | | | | AK000647.1, AF061573.2, AL080163.1, BC002733.1, AK026600.1, BC007499.1, |
| | | | | | AL110171.1, BC009284.1, BC008930.1, AK024524.1, BC007389.1, AL133067.1, |
| | | | | | BC003052.1, AK024588.1, AK024992.1, AF358829.1, AK027121.1, AF159141.1, |
| | | | | | AK027129.1, AL050024.1, AK000432.1, BC002541.1, BC004530.1, BC001967.1, |
| | | | | | BC002798.1, AF143723.1, AL512705.1, AF141289.1, AF177336.1, AB063046.1, |
| | | | | | BC004195.1, AK026762.1, AF159615.1, AF218034.1. |
| HNSMZ53 | 65 | 1315502 | 1-712 | 15-726 | None |
| HNGMJ63 | 66 | 1323768 | 1-1739 | 15-1753 | AC034219.4, AL354865.9, AC025472.3, AL163538.9, AC010128.3, AL159179.3, |
| | | | | | AC008818.6, AL359435.7, AP000810.5, AP001858.4, AL590404.5, AC005076.2, |
| | | | | | AC006249.1, AC007032.2, AL445439.9, AC007625.2, AC023483.4, AL356265.10, |
| | | | | | AC020987.8, AL096793.20, Z82212.1, AL121575.24, AC007200.1, AC024171.4, |
| | | | | | AC069276.3, AC004917.2, AC007965.3, AC008782.6, AC004074.1, AC003686.1, |
| | | | | | AC018814.5, AC022127.4, AL031078.14, AP001964.2, AC034242.5, AL133249.1, |
| | | | | | AL355379.5, AC023160.31, AL135903.12, AL139327.18, AF280107.1, |
| | | | | | AC069294.5, AL355615.12, AL360236.26, AC021133.5, AL590363.6, |
| | | | | | AC004664.1, AC009779.18, AP001660.1, AL356461.15, AP002982.2, |
| | | | | | AL512638.5, AC007247.5, AP000076.1, AL157911.4, Z98255.1, AL031176.8, |
| | | | | | AC025457.5, Z97195.1, AL139277.7, AC008175.2, AC006946.20, AL355606.14, |
| | | | | | Z83745.1, AC008250.23, AL391495.16, AC009514.2, AL157688.4, AC023795.18, |
| | | | | | AL365179.30, AC010395.6, AL161443.13, AL031671.12, AL136980.5, |
| | | | | | AC012610.5, AC007277.2, AC007655.1, AL450487.17, AL159140.4, AC022468.5, |
| | | | | | AC005820.1, AL356503.18, AC006040.3, AL159987.19, AC074338.1, |
| | | | | | AC005297.1, AL139395.6, AL442646.14, AC015971.4, AC000114.1, AL359400.4, |
| | | | | | AL139803.12, AL390125.23, Z99571.1, AC067744.5, AC012598.16, AL079334.7, |
| | | | | | AC073098.10, Z93019.1, AC010196.5, Z82211.1, AL139397.8, AC066590.4, |
| | | | | | AC087857.2, AC016751.7, AL139279.7, U72789.1, AC026425.3, AL050309.4, |
| | | | | | AL356473.11, AC073539.3, AC006313.1, U82671.3, AC007514.5, AL365276.9, |
| | | | | | AC003073.2, AC009016.3, AC034252.3, AL160008.3, AC005020.5, AC010252.3, |
| | | | | | AL390836.12, AP002004.4, AL121788.17, AL391152.3, AP000083.1, AC007611.5, |
| | | | | | AL354793.11, AC009233.3, AC018822.7, AC018795.9, AL390035.10, |
| | | | | | AL031599.1, AC005176.1, AP000508.1, AC048346.13, AL591046.4, AL450320.4, |
| | | | | | AC016591.6, AL138815.6, AP000484.5, AL138965.10, AC011198.2, AC004384.1, |
| | | | | | U82828.1, AL132778.6, AP001376.4, AC023480.6, AL122057.4, AL390799.4, |
| | | | | | AC026189.4, AC005549.1, AL513011.7, AC034191.5, AL590785.7, AC021070.24, |
| | | | | | AC016635.7, AL590224.5, AC025442.5, AC008071.2, AC006369.3, AC044791.6, |
| | | | | | AC008929.3, AL445209.4, AC026167.4, AP000742.4, AC002289.1, AL118517.17, |
| | | | | | AP002532.1, AC007159.4, AB045357.1, AL354685.17, AL121999.18, |
| | | | | | AC022166.6, AC018677.3, AC022413.4, AP003467.2, AC018659.35, |
| | | | | | AL390060.14, AC023154.5, AC009975.9, AL034410.8, AC006992.2, AC010244.5, |
| | | | | | AL450108.12, AL391261.3, L11910.1, AC007286.18, AC023163.24, AC090004.1, |
| | | | | | AC034215.4, AL049796.28, AC073387.4, AC068712.6, AL356498.10, |
| | | | | | AP002378.3, AL590370.2, AC020603.4, AL357332.11, AL355595.10, |
| | | | | | AL121577.1, AC021843.6, AC004103.1, AL096862.18, AL356019.5, AC004385.1, |
| | | | | | Z95328.1, AL121986.12, AL137248.21, AC084373.24, AC009415.2, AC011745.4, |
| | | | | | AF003529.1, AC021269.4, AL163281.2, AC010478.5, AL022101.1, AC078955.24, |
| | | | | | AC017089.3, AC016752.2, AL441985.9, AC006479.2, AP001880.4, AL139109.14, |
| | | | | | AL137026.21, AL117191.6, AL353706.6, AC010198.8, AC008150.8, AC023842.5, |
| | | | | | AC018645.4, AC079842.19, AL135746.3, AL157997.5, AL357513.8, |
| | | | | | AL137065.10, AC026351.28, Z82195.1, AL451048.12, AC003973.1, AC090043.1, |
| | | | | | AL355871.5, AC023245.5, AC006371.2, AL096827.3, AL512623.5, AL109941.17, |
| | | | | | AC007282.4. |
| HNSIT44 | 67 | 1315491 | 1-1065 | 15-1079 | AE006464.1, Z97986.3. |
| HHMSF21 | 68 | 1306648 | 1-493 | 15-507 | None |
| HNSES94 | 69 | 1306632 | 1-566 | 15-580 | None |
| HH1MU43 | 70 | 1335781 | 1-1372 | 15-1386 | AF105427.1, AL049423.1, AL390167.1, BC002535.1. |
| HHMNV67 | 71 | 1335553 | 1-799 | 15-813 | T86494, T85589, T85588, AA502331, AA551860, AA568450, AI017393, T78178, |
| | | | | | AW079940, AW444616, BF593574. |
| HMTSU69 | 72 | 1335548 | 1-743 | 15-757 | AA503839 |
| HMWCU24 | 73 | 1318364 | 1-1720 | 15-1734 | BC007703.1. |
| HCPCI91 | 74 | 1323889 | 1-1729 | 15-1743 | Z30183.1, U94592.1, U45328.1, T71330, T71482, T71560, T74091, T87237, T79791, |
| | | | | | T97835, T99340, R41344, R41344, H04458, H04537, H09795, H29267, H94779, H98681, |
| | | | | | N27248, N34764, N73457, AA082465, AA156281, AA156393, AA215785, AA483615, |
| | | | | | AA507967, AA583057, AA588437, AA594963, AA613581, AA633495, AA748024, |
| | | | | | AA807741, AA830528, AA862351, AA916426, AI088857, C00631, AI026716, T10196, |
| | | | | | T82010, F10230, AI142511, AI261966, AI280832, AI285008, AI306645, AI356184, |
| | | | | | AI471017, AI125040, AI587003, AI685127, AI783537, AW051263, AW168908, |
| | | | | | AW078897, AW439214, AW518053, BG696703, AV724056, AV729211. |
| HDMSA08 | 75 | 1322805 | 1-1390 | 15-1404 | AB007938.1, AL031447.4, U45328.1, R38988, R43832, R50556, R43832, R60719, |
| | | | | | H22240, H28536, R94549, R94548, N20816, N43777, N55283, N63697, AA156118, |
| | | | | | AA555120, C01840, AA649849, AA478757, AA479977, AA725569, AI092905, |
| | | | | | AI093308, AI094527, Z39421, F04529, AI279562, AI341525, AI417906, AI553702, |
| | | | | | AI498753, AI126279, AI651365, AI241636, AI590950, AI620203, AI758108, AI857798, |
| | | | | | AI869320, AI985126, AW024507, AW131832, AW135834, AW137095, AW236524, |
| | | | | | AW295221, AW771530, BG678031. |
| HCPBA16 | 76 | 1319147 | 1-1789 | 15-1803 | L38486.1, AC004448.2, AL160492.5, BC002839.1, AK024538.1, AB060929.1, |
| | | | | | AF252872.1, AL136784.1, AL133067.1, AL512719.1, U91329.1, AL512754.1, |
| | | | | | BC007326.1, AB049848.1, AL133640.1, AF078844.1, AK026480.1, AB063079.1, |
| | | | | | AL117583.1, BC003682.1, AL049430.1, AL137459.1, AL133081.1, AB052191.1, |
| | | | | | AK026784.1, AB050431.1, AK025967.1, AF061943.1, AL122121.1, AL389939.1, |
| | | | | | AF358829.1, AB048975.1, AL353940.1, AF321617.1, U42766.1, BC008387.1, |
| | | | | | AK026865.1, AL512718.1, AL136928.1, BC008365.1, AF218031.1, M86826.1, |
| | | | | | AK025958.1, AL137648.1, AB049758.1, AL442082.1, AL133014.1, AF111112.1, |
| | | | | | AF353396.1, AB048994.1, AL162006.1, AL162062.1, AL117457.1, AK026452.1, |
| | | | | | AL133016.1, AF104032.1, AL122049.1, AK026630.1, AK025573.1, BC003687.1, |
| | | | | | AF090901.1, AL133565.1, AL137556.1, BC001045.1, AK000445.1, AF132676.1, |
| | | | | | AB063008.1, AF061836.1, AK026592.1, AK025414.1, AB055366.1, BC007053.1, |
| | | | | | BC004244.1, AK027116.1, AL136864.1, AK026532.1, AK025465.1, AL136799.1, |
| | | | | | AF271350.1, AB051158.1, AL122111.1, AL359618.1, BC003650.1, AK026608.1, |
| | | | | | AL353956.1, AL137521.1, AL389935.1, AL137476.1, AL080086.1, BC007389.1, |
| | | | | | AL390154.1, AL353957.1, BC004530.1, AF260566.1, AL080137.1, AL133080.1, |
| | | | | | AL137557.1, AF028823.2, AK026642.1, BC000348.1, AK024524.1, Y10080.1, |
| | | | | | AL136622.1, AK025391.1, AB047615.1, X69819.1, AB056420.1, BC004958.1, |
| | | | | | AB060852.1, AL133072.1, AK000618.1, AK024588.1, AL133093.1, BC008416.1, |
| | | | | | AK026045.1, BC008417.1, AB056421.1, AB060863.1, BC001963.1, AB046642.1, |
| | | | | | AF090900.1, AK025312.1, AK026600.1, U77594.1, X65873.1, AK026593.1, |
| | | | | | AK000718.1, AK026408.1, AL122110.1, AL137526.1, BC003683.1, BC008284.1, |
| | | | | | BC005151.1, AF073483.1, AL136786.1, AK025209.1, AK026741.1, AL512746.1, |
| | | | | | AK027164.1, AL080158.1, AL512689.1, AK025906.1, AB055303.1, AB060839.1, |
| | | | | | AB060887.1, AK026927.1, AK025383.1, AL110222.1, AL133606.1, AL133560.1, |
| | | | | | AK026534.1, AF081195.1, BC001418.2, BC008382.1, AF348209.1, AL353625.5, |
| | | | | | BC008780.1, AF003737.1, BC003627.1, AB060912.1, X53587.1, AF177336.1, |
| | | | | | AK026086.1, AB063070.1, AK026353.1, AK000432.1, AK000647.1, AK026164.1, |
| | | | | | BC004951.1, AB063046.1, AB060908.1, AB060916.1, AK025092.1, AB060825.1, |
| | | | | | AL117432.1, AL136789.1, AK025708.1, AF125949.1, S78214.1, AF111847.1, |
| | | | | | AL157431.1, AL136586.1, AL080074.1, AL137527.1, AF081197.1, AL050277.1, |
| | | | | | BC007024.1, Y16645.1, AL050024.1, AL110196.1, AB047887.1, AK000137.1, |
| | | | | | AL049382.1, AB048919.1, AB047941.1, AK026744.1, AK025375.1, AK000450.1, |
| | | | | | AK000083.1, AL117460.1, AK000421.1, AK027614.1, AK027142.1, AL442072.1, |
| | | | | | AL133077.1, AB063100.1, BC007021.1, AB055361.1, X98834.1, AL512765.1, |
| | | | | | AB019565.1, AL133104.1, AF090934.1, AB060826.1, AF097996.1, AF090896.1, |
| | | | | | AL512684.1, BC001967.1, AB056427.1, AK025491.1, AK025349.1, AB055368.1, |
| | | | | | AK026542.1, S69510.1, AL136768.1, BC002342.1, AK000391.1, AL117394.1, |
| | | | | | AL137294.1, AB062750.1, AK026647.1, BC009284.1, AK026464.1, BC009033.1, |
| | | | | | BC008070.1, AL389978.1, AL049452.1, R72286, R73946, H24838, H26366, H27477, |
| | | | | | H27517, H27589, H42824, H44235, N29031, N91586, AA056739, AA058410, |
| | | | | | AA639030, AA639230, AA910574, AA954141, AA962038, T82713, AI453656, |
| | | | | | AI276662, AI338919, AI682763, AI923365, AW029357, AW138051, AW244084, |
| | | | | | AW296610, BG696343, BG697635. |
| HCPBM77 | 77 | 1324637 | 1-4151 | 15-4165 | U49973.1, AL022143.1, AC024587.4, AL137918.4, AC025168.7, AC012377.5, |
| | | | | | AC019330.3, AP002852.3, T59227, T59268, N64555, N67061, AA024662, AA024968, |
| | | | | | AA133431, AA258397, AA258414, AA419525, AA419609, AA417652, AA421744, |
| | | | | | AA593295, AA600736, AA622501, AA657729, AA662437, AA936765, AI075349, |
| | | | | | C03119, C04206, C05155, AA410897, AA446024, AA455496, AA455497, AA478719, |
| | | | | | AA634323, AA456579, AA775524, AA852211, AA912802, AA971661, AA978105, |
| | | | | | AA994712, AI024974, AI039656, AI082183, AI084698, AI090486, AI092202, D31528, |
| | | | | | D31541, AA774270, AI270416, AI350380, AI446798, AI432010, AI564218, AI148235, |
| | | | | | AI191710, AI218226, AI221431, AI538117, AI272646, AI828437, AI862133, |
| | | | | | AW008286, AW024492, AW305114, AW338252, AW572523, BF001215, BF197746, |
| | | | | | BF940540. |
| HCPBR37 | 78 | 1319172 | 1-589 | 15-603 | AL121832.56. |
| HIEAG70 | 79 | 1319141 | 1-694 | 15-708 | None |
| HDMTL77 | 80 | 1319253 | 1-2401 | 15-2415 | AA039429, F16124, AA211338, AA216015, AA249623, AA249665, AA404417, |
| | | | | | AI572463. |
| HDMTP20 | 81 | 1322795 | 1-1216 | 15-1230 | D12676.1, Z65506.1, R59680, AA133698, AA424124, R29757, AA090023, |
| | | | | | AW615037, BG682287. |
| HIEAP38 | 82 | 1319194 | 1-609 | 15-623 | AC002522.2, AC000095.3, AC004461.3, L77570.1, L46584.1. |
| HIEBT86 | 83 | 1322715 | 1-624 | 15-638 | AC007686.5, AE000658.1, AC004695.1, AF111168.2, AC005288.1, AC005088.2, |
| | | | | | AL136126.34, AC008736.6, AF287262.1, AL353685.23, AF275948.1, AL359236.4, |
| | | | | | AL158052.10, AL135978.4, AC009131.6, AC006441.13, AL136365.9, |
| | | | | | AC004526.1, AC008474.7, AP002812.3, AC008873.4, AC022405.5, AC009087.4, |
| | | | | | AL158823.11, AC002300.1, AC005776.1, AC005730.1, AP003357.2, |
| | | | | | AL137145.13, AP001717.1, AC007956.5, AC005512.1, AL034417.14, |
| | | | | | AL031280.6, AC007193.1, AL049713.20, AC010203.13, Z99716.4, AC011236.8, |
| | | | | | AL356915.19, AL049776.3, AL035423.4, AE006640.1, AC003037.1, AC019206.4, |
| | | | | | AP000116.1, AC004254.1, AL161747.5, AC008755.6, AC002378.1, AL589723.7, |
| | | | | | AC011519.7, L78810.1, AL158196.24, AC021016.4, AL591025.8, AC003108.1, |
| | | | | | AC006530.4, AL035587.5, AC010513.6, AB043547.1, Z97832.11, AL117191.6, |
| | | | | | AC019205.4, AL022165.1, AL158167.15, AC005815.1, AC003043.1, |
| | | | | | AL121601.13, AP001670.1, AC005231.2, AC020750.3, AL121656.2, AC012318.7, |
| | | | | | AC007371.16, AL109942.13, AL445071.14, AL034405.16, Z94056.1, |
| | | | | | AL157938.22, AP000793.5, AL096700.14, AL451125.7, AC006241.1, AJ003147.1, |
| | | | | | AC005015.2, AC090527.3, AC005225.2, AL353708.10, AL035086.12, |
| | | | | | AC021325.5, AC009024.6, AL163279.2, AC018637.3, AC008760.6, AC026464.6, |
| | | | | | AL354750.12, Z95116.1, AL031848.11, AL138720.19, AL133410.31, |
| | | | | | AL049795.20, AL109797.18, AL049757.14, AL137012.6, AC078962.30, Z93015.9, |
| | | | | | AC008695.9, AC009144.5, AL035458.35, AF127577.2, AP001330.3, Z98752.16, |
| | | | | | AC006111.3, AL357560.11, AC007546.5, AL158830.17, AC005874.3, |
| | | | | | AF134471.1, AL049874.3, AC006449.19, AC018500.3, AL160269.14, Z84480.1, |
| | | | | | AC004813.2, AC006345.4, AC007226.3, AC005562.1, AC008655.6, AC005080.2, |
| | | | | | AF285442.1, AL139317.5, AL354932.26, AC027644.9, AL109865.36, |
| | | | | | AC007404.4, AC009194.8, AL357153.4, AC007666.12, AP001714.1, AP001695.1, |
| | | | | | AP002852.3, AL022316.2, AL118525.17, AP001728.1, AC005696.1, AL359392.9, |
| | | | | | AC011742.3, AL162505.20, AC004745.1, AC005412.6, AC008745.6, |
| | | | | | AL356299.16, AL121972.17, AL121926.24, Z82976.1, AC004491.1, AL354696.11, |
| | | | | | AC005069.2, AC002366.1, AC026185.3, AC004685.1, AC004531.1, AL161936.15, |
| | | | | | AC024163.2, AL357315.14, AL365505.15, AC005071.2, AC002400.1, AJ300188.1, |
| | | | | | AL355312.24, AC073838.6, AL031687.17, AC005522.2, AP000555.1, |
| | | | | | AC010311.8, AC009311.3, AC005632.2, D87675.1, AL136170.12, AL035071.17, |
| | | | | | AL136000.4, AC008816.7, AC006038.2, AC004971.3, AL023575.1, AC007934.7, |
| | | | | | AC004000.1, AC004859.2, AL162430.15, AC018641.3, AC006148.3, AC020983.7, |
| | | | | | AC004656.1, AC010326.6, AL353777.18, AL139188.14, AC009122.8, |
| | | | | | AL117336.22, AL023693.25, AC010956.12, Z84466.1, AL137792.11, AC005156.1, |
| | | | | | AL137881.12, AC005000.2, AL121890.34, AL157818.12, AC020904.6, |
| | | | | | AF205588.1, AL121675.36, AL590076.3, AP000014.2, AF288742.1, AC006451.5, |
| | | | | | AC011894.3, AC011452.6, AP000557.2, AC009032.7, AL031291.3, AC004815.2, |
| | | | | | AC022217.5, AL035072.16. |
| HIGAN47 | 84 | 1319301 | 1-639 | 15-653 | None |
| HDMSW74 | 85 | 1319286 | 1-914 | 15-928 | M69199.1, M72885.1, AL031316.2, Z63081.1, T52813, AA158156, AA161277, |
| | | | | | AA193002, AA918526, AA937233, AI000559, F20863, F21533, F21896, F22306, |
| | | | | | F22710, F22711, AW083748, AW300734, AW339677, AW613301, AW664336, |
| | | | | | AV689429, AV706542, AV709160, AV721445. |
| HIGBGI8 | 86 | 1324325 | 1-1127 | 15-1141 | None |
| HDMTE62 | 87 | 1319302 | 1-1860 | 15-1874 | AL137026.21, U19495.1, L36034.1, L36033.1, U16752.1, R09154, R09256, |
| | | | | | R10360, R10359, T95660, H14505, R92638, R94237, R94334, N78468, AA056662, |
| | | | | | AA203591, AA903922, N85438, N88189, AA090588, AA093344, AA248568, |
| | | | | | AA248686, AA442810, AI015208, AI655759, BG675309, BG698155, AV727207. |
| HCPRA19 | 88 | 1324733 | 1-737 | 15-751 | U81006.1, AL139035.27. |
| HCPCB26 | 89 | 1319182 | 1-1066 | 15-1080 | AL133371.3, U64998.1, AF037081.1, AF037088.1, AF037082.1, AF037089.1, |
| | | | | | AF037083.1, AF037090.1, AF037087.1, AF037084.1, AF037086.1, AF037085.1, |
| | | | | | AF078124.1, AF078123.1, R21748, R21793, R22157, R22158, R80186, R80287, |
| | | | | | N45724, N49002, N71348, N71398, N99815, AA234555, AA263000, AA278536, |
| | | | | | AA278859, AA834541, AA973893, D79804, AA455158, AA456519, AA433867, |
| | | | | | AA777226, AA993270, AI023287, A1080148, AA701545, AA702974, A1142565, |
| | | | | | AI418898, AI421331, AI423437, AI151384, AI220385, AI263505, AI590889, |
| | | | | | AW026402, AW051423, AW151044, AW205476, BE466696, BE466877. |
| HCPCN28 | 90 | 1319035 | 1-1573 | 15-1587 | M57730.1, D17034.1, T48321, T67802, T67948, T67040, T67041, T83908, R09529, |
| | | | | | R09642, T83737, R16473, R16773, R25443, R26269, H05343, H26912, H28048, H39855, |
| | | | | | R86113, N33097, N44668, N79489, W16656, W60696, W60757, AA081151, AA083763, |
| | | | | | AA132950, AA132862, AA149302, AA149416, AA191527, AA194936, AA195535, |
| | | | | | AA233905, AA234134, AA418894, AA418893, AA225822, AA621894, AA579348, |
| | | | | | AA569405, AA857015, AA876398, AA917947, AA948710, AA968864, AA969849, |
| | | | | | AA974516, N85656, AA094930, AA441908, AA442015, AA495912, AA495913, |
| | | | | | AA664016, AA630361, AA722824, AA780811, AA782753, AI017222, AI090694, |
| | | | | | AI122922, AI250063, AI262777, AI276361, AI280804, AI291111, AI309983, AI318108, |
| | | | | | AI201500, AI222459, AI492535, AI582399, AI130891, AI138921, AI623381, AI185646, |
| | | | | | AI190635, AI191705, AI214739, AI218289, AI657139, AI219043, AI219046, AI224868, |
| | | | | | AI636740, AI278332, AI609344, AI634301, AI634958, AI635021, AI682402, AI739082, |
| | | | | | AI758542, AI818203, AI829052, AI866102, AI870489, AI804566, AI934505, AI955660, |
| | | | | | AI963521, AI972072, AW009549, AI983762, AI984243, AW083559, AW131161, |
| | | | | | AW138194, AW138800, AW274944, AW190490, AW078823, AW473128, AW513882, |
| | | | | | BE858863, BG056621, BG057099, BG677123, BG698507, BE876614, AU120033. |
| HABCP53 | 91 | 1322789 | 1-702 | 15-716 | M33195.1, M33196.1, S49037.1, T48758, T48759, R31350, R31609, R64689, |
| | | | | | R64690, R79170, R79271, R80909, R80910, H71637, H71638, H79353, H79469, N66119, |
| | | | | | N98747, W01253, W86161, AA505908, AA513769, AA740952, AA875937, AA938273, |
| | | | | | AA977372, AA485544, AA486142, AA983824, AA992486, AA994074, AI075712, |
| | | | | | D20362, AA699470, AI270252, AI292115, AI306449, AI310689, AI365499, AI198177, |
| | | | | | AI222646, AI471143, AI126565, AI127246, AI288480, AI288264, AI830761, |
| | | | | | AW193122, AW473871, BF941512, AV702069, AV713916, AV714510, AV714685, |
| | | | | | AV715358, AV734395, AV756044. |
| HCPBO66 | 92 | 1324570 | 1-1202 | 15-1216 | BC009016.1, T72087, T72232, T95291, R43349, R47871, R43349, H01130, H42114, |
| | | | | | H78057, N38801, N45434, N47826, AA025765, AA640081, AA577400, AA827271, |
| | | | | | AA917673, AA922077, C17007, AA485613, AA609464, AA954441, AI088641, |
| | | | | | AI274361, AI283829, AI285277, AI291153, AI304507, AI336608, AI346224, AI300176, |
| | | | | | AI561024, AI682589, AI687717, BG060138, AV689909. |
| HIGAT14 | 93 | 1321874 | 1-528 | 15-542 | BC007061.1, J02883.1, M95529.1, AL157823.9. |
| HESYT64 | 94 | 1320561 | 1-1185 | 15-1199 | AC001228.1, U77456.1, AL390066.5, AC005815.1, U51281.1, BE873278. |
| HALJC43 | 95 | 1320481 | 1-830 | 15-844 | AA213701, AA600374, AI348525, AI681689, AI697484, AW129779. |
| HESZO72 | 96 | 1319148 | 1-600 | 15-614 | AL359997.8, AL445483.13, AC009955.4, AL359644.10, AC008507.8, U47924.1, |
| | | | | | AL138880.14, AL031659.9, AL352976.3, AC019206.4, AL133467.4, AL049563.4, |
| | | | | | AC004913.2, AL160236.4, AC008592.4, AL031311.1, AC007510.6, AF131216.1, |
| | | | | | Z93015.9, AL445923.10, AC024163.2, AP001686.1, AC007850.29, AC007193.1, |
| | | | | | AC073332.13, AC067742.5, AL118557.5, AL356432.17, AL360294.11, |
| | | | | | AC010234.5, AC003035.1, AP002022.1, AC005703.2, AC018801.4, AC006039.2, |
| | | | | | AL354815.10, AC009429.3, AC008403.6, AC007919.18, AC022148.5, |
| | | | | | AP003357.2, AL008718.23, AC006484.2, AC012560.4, AP001712.1, AC005378.2, |
| | | | | | AL135749.3, AC005393.1, AL445201.14, AP003439.2, AC009233.3, AC087225.1, |
| | | | | | AL022323.7, AC020550.4, AC023513.21, AC078994.3, AP000359.1, |
| | | | | | AL160411.25, AC010149.8, AL078477.5, AC007597.3, AC087071.2, AC019205.4, |
| | | | | | AB038653.1, AC003046.3, AL138499.4, AC019187.3, AC017099.11, AL031228.1, |
| | | | | | AC011464.5, AC004865.1, AC006581.16, Z98751.1, AC005184.1, AP001727.1, |
| | | | | | AL163283.2, AP001670.1, AC007151.2, AC004980.4, AL356019.5, AL138836.15, |
| | | | | | AC009144.5, AL512323.8. |
| HESZV10 | 97 | 1319160 | 1-614 | 15-628 | None |
| HESYL64 | 98 | 1319153 | 1-620 | 15-634 | AB046636.1. |
| HESYN37 | 99 | 1319167 | 1-716 | 15-730 | None |

Description of Table 4

[0277] Table 4 provides a key to the tissue/cell source identifier code disclosed in Table 1B, column 8. Column 1 provides the tissue/cell source identifier code disclosed in Table 1B, Column 8. Columns 2-5 provide a description of the tissue or cell source. Note that “Description” and “Tissue” sources (ie., columns 2 and 3) having the prefix “a_” indicates organs, tissues, or cells derived from “adult” sources. Codes corresponding to diseased tissues are indicated in column 6 with the word “disease.” The use of the word “disease” in column 6 is non-limiting. The tissue or cell source may be specific (e.g., a neoplasm), or may be disease-associated (e.g., a tissue sample from a normal portion of a diseased organ). Furthermore, tissues and/or cells lacking the “disease” designation may still be derived from sources directly or indirectly involved in a disease state or disorder, and therefore may have a further utility in that disease state or disorder. In numerous cases where the tissue/cell source is a library, column 7 identifies the vector used to generate the library.

TABLE 4

| | | | | Cell | | |
|---|---|---|---|---|---|---|
| Code | Description | Tissue | Organ | Line | Disease | Vector |
| H0004 | Human Adult Spleen | Human Adult Spleen | Spleen | | | Uni-ZAP XR |
| H0009 | Human Fetal Brain | | | | | Uni-ZAP XR |
| H0011 | Human Fetal Kidney | Human Fetal Kidney | Kidney | | | Uni-ZAP XR |
| H0012 | Human Fetal Kidney | Human Fetal Kidney | Kidney | | | Uni-ZAP XR |
| H0013 | Human 8 Week Whole | Human 8 Week Old | Embryo | | | Uni-ZAP XR |
| | Embryo | Embryo | | | | |
| H0014 | Human Gall Bladder | Human Gall Bladder | Gall Bladder | | | Uni-ZAP XR |
| H0015 | Human Gall Bladder, | Human Gall Bladder | Gall Bladder | | | Uni-ZAP XR |
| | fraction II | | | | | |
| H0024 | Human Fetal Lung III | Human Fetal Lung | Lung | | | Uni-ZAP XR |
| H0029 | Human Pancreas | Human Pancreas | Pancreas | | | Uni-ZAP XR |
| H0030 | Human Placenta | | | | | Uni-ZAP XR |
| H0031 | Human Placenta | Human Placenta | Placenta | | | Uni-ZAP XR |
| H0032 | Human Prostate | Human Prostate | Prostate | | | Uni-ZAP XR |
| H0036 | Human Adult Small | Human Adult Small | Small Int. | | | Uni-ZAP XR |
| | Intestine | Intestine | | | | |
| H0038 | Human Testes | Human Testes | Testis | | | Uni-ZAP XR |
| H0039 | Human Pancreas Tumor | Human Pancreas | Pancreas | | disease | Uni-ZAP XR |
| | | Tumor | | | | |
| H0040 | Human Testes Tumor | Human Testes | Testis | | disease | Uni-ZAP XR |
| | | Tumor | | | | |
| H0041 | Human Fetal Bone | Human Fetal Bone | Bone | | | Uni-ZAP XR |
| H0042 | Human Adult Pulmonary | Human Adult | Lung | | | Uni-ZAP XR |
| | | Pulmonary | | | | |
| H0044 | Human Cornea | Human Cornea | eye | | | Uni-ZAP XR |
| H0046 | Human Endometrial Tumor | Human Endometrial | Uterus | | disease | Uni-ZAP XR |
| | | Tumor | | | | |
| H0047 | Human Fetal Liver | Human Fetal Liver | Liver | | | Uni-ZAP XR |
| H0049 | Human Fetal Kidney | Human Fetal Kidney | Kidney | | | Uni-ZAP XR |
| H0050 | Human Fetal Heart | Human Fetal Heart | Heart | | | Uni-ZAP XR |
| H0051 | Human Hippocampus | Human | Brain | | | Uni-ZAP XR |
| | | Hippocampus | | | | |
| H0052 | Human Cerebellum | Human Cerebellum | Brain | | | Uni-ZAP XR |
| H0056 | Human Umbilical Vein, | Human Umbilical | Umbilical vein | | | Uni-ZAP XR |
| | Endo. remake | Vein Endothelial | | | | |
| | | Cells | | | | |
| H0057 | Human Fetal Spleen | | | | | Uni-ZAP XR |
| H0059 | Human Uterine Cancer | Human Uterine | Uterus | | disease | Lambda ZAP II |
| | | Cancer | | | | |
| H0061 | Human Macrophage | Human Macrophage | Blood | Cell | | pBluescript |
| | | | | Line | | |
| H0063 | Human Thymus | Human Thymus | Thymus | | | Uni-ZAP XR |
| H0069 | Human Activated T-Cells | Activated T-Cells | Blood | Cell | | Uni-ZAP XR |
| | | | | Line | | |
| H0071 | Human Infant Adrenal | Human Infant | Adrenal gland | | | Uni-ZAP XR |
| | Gland | Adrenal Gland | | | | |
| H0081 | Human Fetal Epithelium | Human Fetal Skin | Skin | | | Uni-ZAP XR |
| | (Skin) | | | | | |
| H0083 | HUMAN JURKAT | Jurkat Cells | | | | Uni-ZAP XR |
| | MEMBRANE BOUND | | | | | |
| | POLYSOMES | | | | | |
| H0085 | Human Colon | Human Colon | | | | Lambda ZAP II |
| H0086 | Human epithelioid sarcoma | Epithelioid Sarcoma, | Sk Muscle | | disease | Uni-ZAP XR |
| | | muscle | | | | |
| H0087 | Human Thymus | Human Thymus | | | | pBluescript |
| H0090 | Human T-Cell Lymphoma | T-Cell Lymphoma | T-Cell | | disease | Uni-ZAP XR |
| H0092 | Human Pancreas Tumor | Human Pancreas | Pancreas | | disease | Uni-ZAP XR |
| | | Tumor | | | | |
| H0098 | Human Adult Liver, | Human Adult Liver | Liver | | | Uni-ZAP XR |
| | subtracted | | | | | |
| H0099 | Human Lung Cancer, | Human Lung Cancer | Lung | | | pBluescript |
| | subtracted | | | | | |
| H0100 | Human Whole Six Week | Human Whole Six | Embryo | | | Uni-ZAP XR |
| | Old Embryo | Week Old Embryo | | | | |
| H0101 | Human 7 Weeks Old | Human Whole 7 | Embryo | | | Lambda ZAP II |
| | Embryo, subtracted | Week Old Embryo | | | | |
| H0106 | Human Right Hemisphere | Human Brain, right | Brain | | | Uni-ZAP XR |
| | of Brain, subtrac | hemisphere | | | | |
| H0107 | Human Infant Adrenal | Human Infant | Adrenal gland | | | pBluescript |
| | Gland, subtracted | Adrenal Gland | | | | |
| H0108 | Human Adult Lymph Node, | Human Adult | Lymph Node | | | Uni-ZAP XR |
| | subtracted | Lymph Node | | | | |
| H0110 | Human Old Ovary, | Human Old Ovary | Ovary | | | pBluescript |
| | subtracted | | | | | |
| H0111 | Human Placenta, subtracted | Human Placenta | Placenta | | | pBluescript |
| H0112 | Human Parathyroid Tumor, | Human Parathyroid | Parathyroid | | | pBluescript |
| | subtracted | Tumor | | | | |
| H0116 | Human Thymus Tumor, | Human Thymus | Thymus | | | pBluescript |
| | subtracted | Tumor | | | | |
| H0117 | Human Uterine Cancer, | Human Uterine | Uterus | | | pBluescript |
| | subtracted | Cancer | | | | |
| H0120 | Human Adult Spleen, | Human Adult Spleen | Spleen | | | Uni-ZAP XR |
| | subtracted | | | | | |
| H0122 | Human Adult Skeletal | Human Skeletal | Sk Muscle | | | Uni-ZAP XR |
| | Muscle | Muscle | | | | |
| H0123 | Human Fetal Dura Mater | Human Fetal Dura | Brain | | | Uni-ZAP XR |
| | | Mater | | | | |
| H0124 | Human Rhabdomyosarcoma | Human | Sk Muscle | | disease | Uni-ZAP XR |
| | | Rhabdomyosarcoma | | | | |
| H0125 | Cem cells cyclohexamide | Cyclohexamide | Blood | Cell | | Uni-ZAP XR |
| | treated | Treated Cem, Jurkat, | | Line | | |
| | | Raji, and Supt | | | | |
| H0130 | LNCAP untreated | LNCAP Cell Line | Prostate | Cell | | Uni-ZAP XR |
| | | | | Line | | |
| H0131 | LNCAP + o.3 nM R1881 | LNCAP Cell Line | Prostate | Cell | | Uni-ZAP XR |
| | | | | Line | | |
| H0132 | LNCAP + 30 nM R1881 | LNCAP Cell Line | Prostate | Cell | | Uni-ZAP XR |
| | | | | Line | | |
| H0134 | Raji Cells, cyclohexamide | Cyclohexamide | Blood | Cell | | Uni-ZAP XR |
| | treated | Treated Cem, Jurkat, | | Line | | |
| | | Raji, and Supt | | | | |
| H0135 | Human Synovial Sarcoma | Human Synovial | Synovium | | | Uni-ZAP XR |
| | | Sarcoma | | | | |
| H0136 | Supt Cells, cyclohexamide | Cyclohexamide | Blood | Cell | | Uni-ZAP XR |
| | treated | Treated Cem, Jurkat, | | Line | | |
| | | Raji, and Supt | | | | |
| H0140 | Activated T-Cells, 8 hrs. | Activated T-Cells | Blood | Cell | | Uni-ZAP XR |
| | | | | Line | | |
| H0141 | Activated T-Cells, 12 hrs. | Activated T-Cells | Blood | Cell | | Uni-ZAP XR |
| | | | | Line | | |
| H0142 | MCF7 Cell Line | MCF7 Cell line | Breast | Cell | | Uni-ZAP XR |
| | | | | Line | | |
| H0144 | Nine Week Old Early Stage | 9 Wk Old Early | Embryo | | | Uni-ZAP XR |
| | Human | Stage Human | | | | |
| H0147 | Human Adult Liver | Human Adult Liver | Liver | | | Uni-ZAP XR |
| H0150 | Human Epididymus | Epididymis | Testis | | | Uni-ZAP XR |
| H0151 | Early Stage Human Liver | Human Fetal Liver | Liver | | | Uni-ZAP XR |
| H0156 | Human Adrenal Gland | Human Adrenal | Adrenal Gland | | disease | Uni-ZAP XR |
| | Tumor | Gland Tumor | | | | |
| H0158 | Activated T-Cells, 4 hrs., | Activated T-Cells | Blood | Cell | | Uni-ZAP XR |
| | ligation 2 | | | Line | | |
| H0159 | Activated T-Cells, 8 hrs., | Activated T-Cells | Blood | Cell | | Uni-ZAP XR |
| | ligation 2 | | | Line | | |
| H0163 | Human Synovium | Human Synovium | Synovium | | | Uni-ZAP XR |
| H0165 | Human Prostate Cancer, | Human Prostate | Prostate | | disease | Uni-ZAP XR |
| | Stage B2 | Cancer, stage B2 | | | | |
| H0166 | Human Prostate Cancer, | Human Prostate | Prostate | | disease | Uni-ZAP XR |
| | Stage B2 fraction | Cancer, stage B2 | | | | |
| H0169 | Human Prostate Cancer, | Human Prostate | Prostate | | disease | Uni-ZAP XR |
| | Stage C fraction | Cancer, stage C | | | | |
| H0170 | 12 Week Old Early Stage | Twelve Week Old | Embryo | | | Uni-ZAP XR |
| | Human | Early Stage Human | | | | |
| H0171 | 12 Week Old Early Stage | Twelve Week Old | Embryo | | | Uni-ZAP XR |
| | Human, II | Early Stage Human | | | | |
| H0172 | Human Fetal Brain, random | Human Fetal Brain | Brain | | | Lambda ZAP II |
| | primed | | | | | |
| H0178 | Human Fetal Brain | Human Fetal Brain | Brain | | | Uni-ZAP XR |
| H0179 | Human Neutrophil | Human Neutrophil | Blood | Cell | | Uni-ZAP XR |
| | | | | Line | | |
| H0181 | Human Primary Breast | Human Primary | Breast | | disease | Uni-ZAP XR |
| | Cancer | Breast Cancer | | | | |
| H0187 | Resting T-Cell | T-Cells | Blood | Cell | | Lambda ZAP II |
| | | | | Line | | |
| H0188 | Human Normal Breast | Human Normal | Breast | | | Uni-ZAP XR |
| | | Breast | | | | |
| H0189 | Human Resting Macrophage | Human | Blood | Cell | | Uni-ZAP XR |
| | | Macrophage/Monocytes | | Line | | |
| H0194 | Human Cerebellum, | Human Cerebellum | Brain | | | pBluescript |
| | subtracted | | | | | |
| H0196 | Human Cardiomyopathy, | Human | Heart | | | Uni-ZAP XR |
| | subtracted | Cardiomyopathy | | | | |
| H0197 | Human Fetal Liver, | Human Fetal Liver | liver | | | Uni-ZAP XR |
| | subtracted | | | | | |
| H0199 | Human Fetal Liver, | Human Fetal Liver | Liver | | | Uni-ZAP XR |
| | subtracted, neg clone | | | | | |
| H0201 | Human Hippocampus, | Human | Brain | | | pBluescript |
| | subtracted | Hippocampus | | | | |
| H0202 | Jurkat Cells, cyclohexamide | Cyclohexamide | Blood | Cell | | Uni-ZAP XR |
| | treated, subtraction | Treated Cem, Jurkat, | | Line | | |
| | | Raji, and Supt | | | | |
| H0204 | Human Colon Cancer, | Human Colon | Colon | | | pBluescript |
| | subtracted | Cancer | | | | |
| H0207 | LNCAP, differential | LNCAP Cell Line | Prostate | Cell | | pBluescript |
| | expression | | | Line | | |
| H0208 | Early Stage Human Lung, | Human Fetal Lung | Lung | | | pBluescript |
| | subtracted | | | | | |
| H0212 | Human Prostate, subtracted | Human Prostate | Prostate | | | pBluescript |
| H0213 | Human Pituitary, subtracted | Human Pituitary | | | | Uni-ZAP XR |
| H0216 | Supt cells, cyclohexamide | Cyclohexamide | Blood | Cell | | pBluescript |
| | treated, subtracted | Treated Cem, Jurkat, | | Line | | |
| | | Raji, and Supt | | | | |
| H0218 | Activated T-Cells, 0 hrs, | Activated T-Cells | Blood | Cell | | Uni-ZAP XR |
| | subtracted | | | Line | | |
| H0220 | Activated T-Cells, 4 hrs, | Activated T-Cells | Blood | Cell | | Uni-ZAP XR |
| | subtracted | | | Line | | |
| H0224 | Activated T-Cells, 12 hrs, | Activated T-Cells | Blood | Cell | | Uni-ZAP XR |
| | subtracted | | | Line | | |
| H0231 | Human Colon, subtraction | Human Colon | | | | pBluescript |
| H0239 | Human Kidney Tumor | Human Kidney | Kidney | | disease | Uni-ZAP XR |
| | | Tumor | | | | |
| H0246 | Human Fetal Liver- Enzyme | Human Fetal Liver | Liver | | | Uni-ZAP XR |
| | subtraction | | | | | |
| H0247 | Human Membrane Bound | Human Membrane | Blood | Cell | | Uni-ZAP XR |
| | Polysomes- Enzyme | Bound Polysomes | | Line | | |
| | Subtraction | | | | | |
| H0250 | Human Activated | Human Monocytes | | | | Uni-ZAP XR |
| | Monocytes | | | | | |
| H0251 | Human Chondrosarcoma | Human | Cartilage | | disease | Uni-ZAP XR |
| | | Chondrosarcoma | | | | |
| H0252 | Human Osteosarcoma | Human | Bone | | disease | Uni-ZAP XR |
| | | Osteosarcoma | | | | |
| H0253 | Human adult testis, large | Human Adult Testis | Testis | | | Uni-ZAP XR |
| | inserts | | | | | |
| H0255 | breast lymph node CDNA | Breast Lymph Node | Lymph Node | | | Lambda ZAP II |
| | library | | | | | |
| H0257 | HL-60, PMA 4H | HL-60 Cells, PMA | Blood | Cell | | Uni-ZAP XR |
| | | stimulated 4H | | Line | | |
| H0261 | H. cerebellum, Enzyme | Human Cerebellum | Brain | | | Uni-ZAP XR |
| | subtracted | | | | | |
| H0263 | human colon cancer | Human Colon | Colon | | disease | Lambda ZAP II |
| | | Cancer | | | | |
| H0264 | human tonsils | Human Tonsil | Tonsil | | | Uni-ZAP XR |
| H0265 | Activated T-Cell | T-Cells | Blood | Cell | | Uni-ZAP XR |
| | (12 hs)/Thiouridine | | | Line | | |
| | labelledEco | | | | | |
| H0266 | Human Microvascular | HMEC | Vein | Cell | | Lambda ZAP II |
| | Endothelial Cells, fract. A | | | Line | | |
| H0267 | Human Microvascular | HMEC | Vein | Cell | | Lambda ZAP II |
| | Endothelial Cells, fract. B | | | Line | | |
| H0268 | Human Umbilical Vein | HUVE Cells | Umbilical vein | Cell | | Lambda ZAP II |
| | Endothelial Cells, fract. A | | | Line | | |
| H0269 | Human Umbilical Vein | HUVE Cells | Umbilical vein | Cell | | Lambda ZAP II |
| | Endothelial Cells, fract. B | | | Line | | |
| H0270 | HPAS (human pancreas, | Human Pancreas | Pancreas | | | Uni-ZAP XR |
| | subtracted) | | | | | |
| H0271 | Human Neutrophil, | Human Neutrophil - | Blood | Cell | | Uni-ZAP XR |
| | Activated | Activated | | Line | | |
| H0280 | K562 + PMA (36 hrs) | K562 Cell line | cell line | Cell | | ZAP Express |
| | | | | Line | | |
| H0286 | Human OB MG63 treated | Human | Bone | Cell | | Uni-ZAP XR |
| | (10 nM E2) fraction I | Osteoblastoma | | Line | | |
| | | MG63 cell line | | | | |
| H0288 | Human OB HOS control | Human | Bone | Cell | | Uni-ZAP XR |
| | fraction I | Osteoblastoma HOS | | Line | | |
| | | cell line | | | | |
| H0290 | Human OB HOS treated (1 nM | Human | Bone | Cell | | Uni-ZAP XR |
| | E2) fraction I | Osteoblastoma HOS | | Line | | |
| | | cell line | | | | |
| H0292 | Human OB HOS treated (10 nM | Human | Bone | Cell | | Uni-ZAP XR |
| | E2) fraction I | Osteoblastoma HOS | | Line | | |
| | | cell line | | | | |
| H0294 | Amniotic Cells - TNF | Amniotic Cells - | Placenta | Cell | | Uni-ZAP XR |
| | induced | TNF induced | | Line | | |
| H0295 | Amniotic Cells - Primary | Amniotic Cells - | Placenta | Cell | | Uni-ZAP XR |
| | Culture | Primary Culture | | Line | | |
| H0305 | CD34 positive cells (Cord | CD34 Positive Cells | Cord Blood | | | ZAP Express |
| | Blood) | | | | | |
| H0306 | CD34 depleted Buffy Coat | CD34 Depleted | Cord Blood | | | ZAP Express |
| | (Cord Blood) | Buffy Coat (Cord | | | | |
| | | Blood) | | | | |
| H0309 | Human Chronic Synovitis | Synovium, Chronic | Synovium | | disease | Uni-ZAP XR |
| | | Synovitis/ | | | | |
| | | Osteoarthritis | | | | |
| H0310 | human caudate nucleus | Brain | Brain | | | Uni-ZAP XR |
| H0313 | human pleural cancer | pleural cancer | | | disease | pBluescript |
| H0316 | HUMAN STOMACH | Human Stomach | Stomach | | | Uni-ZAP XR |
| H0318 | HUMAN B CELL | Human B Cell | Lymph Node | | disease | Uni-ZAP XR |
| | LYMPHOMA | Lymphoma | | | | |
| H0327 | human corpus colosum | Human Corpus | Brain | | | Uni-ZAP XR |
| | | Callosum | | | | |
| H0328 | human ovarian cancer | Ovarian Cancer | Ovary | | disease | Uni-ZAP XR |
| H0329 | Dermatofibrosarcoma | Dermatofibrosarcoma | Skin | | disease | Uni-ZAP XR |
| | Protuberance | Protuberans | | | | |
| H0331 | Hepatocellular Tumor | Hepatocellular | Liver | | disease | Lambda ZAP II |
| | | Tumor | | | | |
| H0333 | Hemangiopericytoma | Hemangiopericytoma | Blood vessel | | disease | Lambda ZAP II |
| H0334 | Kidney cancer | Kidney Cancer | Kidney | | disease | Uni-ZAP XR |
| H0339 | Duodenum | Duodenum | | | | Uni-ZAP XR |
| H0341 | Bone Marrow Cell Line | Bone Marrow Cell | Bone Marrow | Cell | | Uni-ZAP XR |
| | (RS4; 11) | Line R54; 11 | | Line | | |
| H0343 | stomach cancer (human) | Stomach Cancer - | | | disease | Uni-ZAP XR |
| | | 5383A (human) | | | | |
| H0345 | SKIN | Skin - 4000868H | Skin | | | Uni-ZAP XR |
| H0349 | human adult liver cDNA | Human Adult Liver | Liver | | | pCMVSport 1 |
| | library | | | | | |
| H0351 | Glioblastoma | Glioblastoma | Brain | | disease | Uni-ZAP XR |
| H0352 | Wilm's tumor | Wilm's Tumor | | | disease | Uni-ZAP XR |
| H0354 | Human Leukocytes | Human Leukocytes | Blood | Cell | | pCMVSport 1 |
| | | | | Line | | |
| H0355 | Human Liver | Human Liver, | | | | pCMVSport 1 |
| | | normal Adult | | | | |
| H0356 | Human Kidney | Human Kidney | Kidney | | | pCMVSport 1 |
| H0363 | Human Brain Medulla, | Human Brain | | | | pBluescript |
| | subtracted | Medulla | | | | |
| H0366 | L428 cell line | L428 | | | | ZAP Express |
| H0370 | H. Lymph node breast | Lymph node with | | | disease | Uni-ZAP XR |
| | Cancer | Met. Breast Cancer | | | | |
| H0372 | Human Testes | Human Testes | Testis | | | pCMVSport 1 |
| H0373 | Human Heart | Human Adult Heart | Heart | | | pCMVSport 1 |
| H0374 | Human Brain | Human Brain | | | | pCMVSport 1 |
| H0375 | Human Lung | Human Lung | | | | pCMVSport 1 |
| H0376 | Human Spleen | Human Adult Spleen | Spleen | | | pCMVSport 1 |
| H0379 | Human Tongue, frac 1 | Human Tongue | | | | pSport 1 |
| H0383 | Human Prostate BPH, re- | Human Prostate | | | | Uni-ZAP XR |
| | excision | BPH | | | | |
| H0390 | Human Amygdala | Human Amygdala | | | disease | pBluescript |
| | Depression, re-excision | Depression | | | | |
| H0391 | H. Meningioma, M6 | Human Meningioma | brain | | | pSport1 |
| H0392 | H. Meningioma, M1 | Human Meningioma | brain | | | pSport1 |
| H0393 | Fetal Liver, subtraction II | Human Fetal Liver | Liver | | | pBluescript |
| H0399 | Human Kidney Cortex, re- | Human Kidney | | | | Lambda ZAP II |
| | rescue | Cortex | | | | |
| H0402 | CD34 depleted Buffy Coat | CD34 Depleted | Cord Blood | | | ZAP Express |
| | (Cord Blood), re-excision | Buffy Coat (Cord | | | | |
| | | Blood) | | | | |
| H0406 | H Amygdala Depression, | Human Amygdala | | | | Uni-ZAP XR |
| | subtracted | Depression | | | | |
| H0409 | H. Striatum Depression, | Human Brain, | Brain | | | pBluescript |
| | subtracted | Striatum Depression | | | | |
| H0411 | H Female Bladder, Adult | Human Female | Bladder | | | pSport1 |
| | | Adult Bladder | | | | |
| H0412 | Human umbilical vein | HUVE Cells | Umbilical vein | Cell | | pSport1 |
| | endothelial cells, IL-4 | | | Line | | |
| | induced | | | | | |
| H0413 | Human Umbilical Vein | HUVE Cells | Umbilical vein | Cell | | pSport1 |
| | Endothelial Cells, | | | Line | | |
| | uninduced | | | | | |
| H0415 | H. Ovarian Tumor, II, | Ovarian Tumor, | Ovary | | disease | pCMVSport 2.0 |
| | OV5232 | OV5232 | | | | |
| H0416 | Human Neutrophils, | Human Neutrophil - | Blood | Cell | | pBluescript |
| | Activated, re-excision | Activated | | Line | | |
| H0418 | Human Pituitary, subtracted | Human Pituitary | | | | pBluescript |
| | VII | | | | | |
| H0421 | Human Bone Marrow, re- | Bone Marrow | | | | pBluescript |
| | excision | | | | | |
| H0422 | T-Cell PHA 16 hrs | T-Cells | Blood | Cell | | pSport1 |
| | | | | Line | | |
| H0423 | T-Cell PHA 24 hrs | T-Cells | Blood | Cell | | pSport1 |
| | | | | Line | | |
| H0424 | Human Pituitary, subt IX | Human Pituitary | | | | pBluescript |
| H0427 | Human Adipose | Human Adipose, left | | | | pSport1 |
| | | hiplipoma | | | | |
| H0428 | Human Ovary | Human Ovary | Ovary | | | pSport1 |
| | | Tumor | | | | |
| H0431 | H. Kidney Medulla, re- | Kidney medulla | Kidney | | | pBluescript |
| | excision | | | | | |
| H0435 | Ovarian Tumor Oct. 3, 1995 | Ovarian Tumor, | Ovary | | | pCMVSport 2.0 |
| | | OV350721 | | | | |
| H0436 | Resting T-Cell Library, II | T-Cells | Blood | Cell | | pSport1 |
| | | | | Line | | |
| H0438 | H. Whole Brain #2, re- | Human Whole Brain | | | | ZAP Express |
| | excision | #2 | | | | |
| H0439 | Human Eosinophils | Eosinophils | | | | pBluescript |
| H0441 | H. Kidney Cortex, | Kidney cortex | Kidney | | | pBluescript |
| | subtracted | | | | | |
| H0444 | Spleen metastatic melanoma | Spleen, Metastatic | Spleen | | disease | pSport1 |
| | | malignant melanoma | | | | |
| H0445 | Spleen, Chronic | Human Spleen, CLL | Spleen | | disease | pSport1 |
| | lymphocytic leukemia | | | | | |
| H0450 | CD34+cells, II | CD34 positive cells | | | | pCMVSport 2.0 |
| H0455 | H. Striatum Depression, | Human Brain, | Brain | | | pBluescript |
| | subt | Striatum Depression | | | | |
| H0457 | Human Eosinophils | Human Eosinophils | | | | pSport1 |
| H0458 | CD34+ cell, I, frac II | CD34 positive cells | | | | pSport1 |
| H0459 | CD34+cells, II, FRACTION 2 | CD34 positive cells | | | | pCMVSport 2.0 |
| H0461 | H. Kidney Medulla, | Kidney medulla | Kidney | | | pBluescript |
| | subtracted | | | | | |
| H0462 | H. Amygdala Depression, | | Brain | | | pBluescript |
| | subtracted | | | | | |
| H0477 | Human Tonsil, Lib 3 | Human Tonsil | Tonsil | | | pSport1 |
| H0478 | Salivary Gland, Lib 2 | Human Salivary | Salivary gland | | | pSport1 |
| | | Gland | | | | |
| H0479 | Salivary Gland, Lib 3 | Human Salivary | Salivary gland | | | pSport1 |
| | | Gland | | | | |
| H0483 | Breast Cancer cell line, | Breast Cancer Cell | | | | pSport1 |
| | MDA 36 | line, MDA 36 | | | | |
| H0484 | Breast Cancer Cell line, | Breast Cancer Cell | | | | pSport1 |
| | angiogenic | line, Angiogenic, | | | | |
| | | 36T3 | | | | |
| H0485 | Hodgkin's Lymphoma I | Hodgkin's | | | disease | pCMVSport 2.0 |
| | | Lymphoma I | | | | |
| H0486 | Hodgkin's Lymphoma II | Hodgkin's | | | disease | pCMVSport 2.0 |
| | | Lymphoma II | | | | |
| H0487 | Human Tonsils, lib I | Human Tonsils | | | | pCMVSport 2.0 |
| H0488 | Human Tonsils, Lib 2 | Human Tonsils | | | | pCMVSport 2.0 |
| H0489 | Crohn's Disease | Ileum | Intestine | | disease | pSport1 |
| H0492 | HL-60, RA 4 h, Subtracted | HL-60 Cells, RA | Blood | Cell | | Uni-ZAP XR |
| | | stimulated for 4H | | Line | | |
| H0494 | Keratinocyte | Keratinocyte | | | | pCMVSport 2.0 |
| H0497 | HEL cell line | HEL cell line | | HEL | | pSport1 |
| | | | | 92.1.7 | | |
| H0505 | Human Astrocyte | Human Astrocyte | | | | pSport1 |
| H0506 | Ulcerative Colitis | Colon | Colon | | | pSport1 |
| H0509 | Liver, Hepatoma | Human Liver, | Liver | | disease | pCMVSport 3.0 |
| | | Hepatoma, patient 8 | | | | |
| H0510 | Human Liver, normal | Human Liver, | Liver | | | pCMVSport 3.0 |
| | | normal, Patient # 8 | | | | |
| H0512 | Keratinocyte, lib 3 | Keratinocyte | | | | pCMVSport 2.0 |
| H0518 | pBMC stimulated w/poly | pBMC stimulated | | | | pCMVSport 3.0 |
| | I/C | with poly I/C | | | | |
| H0519 | NTERA2, control | NTERA2, | | | | pCMVSport 3.0 |
| | | Teratocarcinoma cell | | | | |
| | | line | | | | |
| H0520 | NTERA2 + retinoic acid, 14 | NTERA2, | | | | pSport1 |
| | days | Teratocarcinoma cell | | | | |
| | | line | | | | |
| H0521 | Primary Dendritic Cells, lib 1 | Primary Dendritic | | | | pCMVSport 3.0 |
| | | cells | | | | |
| H0522 | Primary Dendritic cells, frac 2 | Primary Dendritic | | | | pCMVSport 3.0 |
| | | cells | | | | |
| H0525 | PCR, pBMC I/C treated | pBMC stimulated | | | | PCRII |
| | | with poly I/C | | | | |
| H0528 | Poly[I]/Poly[C] Normal | Poly[I]/Poly[C] | | | | pCMVSport 3.0 |
| | Lung Fibroblasts | Normal Lung | | | | |
| | | Fibroblasts | | | | |
| H0529 | Myeloid Progenitor Cell | TF-1 Cell Line; | | | | pCMVSport 3.0 |
| | Line | Myeloid progenitor | | | | |
| | | cell line | | | | |
| H0530 | Human Dermal Endothelial | Human Dermal | | | | pSport1 |
| | Cells, untreated | Endothelial Cells; | | | | |
| | | untreated | | | | |
| H0538 | Merkel Cells | Merkel cells | Lymph node | | | pSport1 |
| H0539 | Pancreas Islet Cell Tumor | Pancreas Islet Cell | Pancreas | | disease | pSport1 |
| | | Tumor | | | | |
| H0542 | T Cell helper I | Helper T cell | | | | pCMVSport 3.0 |
| H0543 | T cell helper II | Helper T cell | | | | pCMVSport 3.0 |
| H0544 | Human endometrial stromal | Human endometrial | | | | pCMVSport 3.0 |
| | cells | stromal cells | | | | |
| H0545 | Human endometrial stromal | Human endometrial | | | | pCMVSport 3.0 |
| | cells-treated with | stromal cells-treated | | | | |
| | progesterone | with proge | | | | |
| H0546 | Human endometrial stromal | Human endometrial | | | | pCMVSport 3.0 |
| | cells-treated with estradiol | stromal cells-treated | | | | |
| | | with estra | | | | |
| H0547 | NTERA2 teratocarcinoma | NTERA2, | | | | pSport1 |
| | cell line + retinoic acid (14 | Teratocarcinoma cell | | | | |
| | days) | line | | | | |
| H0549 | H. Epididiymus, caput & | Human Epididiymus, | | | | Uni-ZAP XR |
| | corpus | caput and corpus | | | | |
| H0550 | H. Epididiymus, cauda | Human Epididiymus, | | | | Uni-ZAP XR |
| | | cauda | | | | |
| H0551 | Human Thymus Stromal | Human Thymus | | | | pCMVSport 3.0 |
| | Cells | Stromal Cells | | | | |
| H0553 | Human Placenta | Human Placenta | | | | pCMVSport 3.0 |
| H0555 | Rejected Kidney, lib 4 | Human Rejected | Kidney | | disease | pCMVSport 3.0 |
| | | Kidney | | | | |
| H0556 | Activated T- | T-Cells | Blood | Cell | | Uni-ZAP XR |
| | cell(12 h)/Thiouridine-re- | | | Line | | |
| | excision | | | | | |
| H0559 | HL-60, PMA 4H, re- | HL-60 Cells, PMA | Blood | Cell | | Uni-ZAP XR |
| | excision | stimulated 4H | | Line | | |
| H0560 | KMH2 | KMH2 | | | | pCMVSport 3.0 |
| H0561 | L428 | L428 | | | | pCMVSport 3.0 |
| H0563 | Human Fetal Brain, | Human Fetal Brain | | | | pCMVSport 2.0 |
| | normalized 50021F | | | | | |
| H0569 | Human Fetal Brain, | Human Fetal Brain | | | | pCMVSport 2.0 |
| | normalized CO | | | | | |
| H0570 | Human Fetal Brain, | Human Fetal Brain | | | | pCMVSport 2.0 |
| | normalized C500H | | | | | |
| H0572 | Human Fetal Brain, | Human Fetal Brain | | | | pCMVSport 2.0 |
| | normalized AC5002 | | | | | |
| H0574 | Hepatocellular Tumor; re- | Hepatocellular | Liver | | disease | Lambda ZAP II |
| | excision | Tumor | | | | |
| H0575 | Human Adult Pulmonary; | Human Adult | Lung | | | Uni-ZAP XR |
| | re-excision | Pulmonary | | | | |
| H0576 | Resting T-Cell; re-excision | T-Cells | Blood | Cell | | Lambda ZAP II |
| | | | | Line | | |
| H0580 | Dendritic cells, pooled | Pooled dendritic | | | | pCMVSport 3.0 |
| | | cells | | | | |
| H0581 | Human Bone Marrow, | Human Bone | Bone Marrow | | | pCMVSport 3.0 |
| | treated | Marrow | | | | |
| H0583 | B Cell lymphoma | B Cell Lymphoma | B Cell | | disease | pCMVSport 3.0 |
| H0584 | Activated T-cells, 24 hrs, re- | Activated T-Cells | Blood | Cell | | Uni-ZAP XR |
| | excision | | | Line | | |
| H0585 | Activated T-Cells, 12 hrs, re- | Activated T-Cells | Blood | Cell | | Uni-ZAP XR |
| | excision | | | Line | | |
| H0586 | Healing groin wound, 6.5 | healing groin wound, | groin | | disease | pCMVSport 3.0 |
| | hours post incision | 6.5 hours post | | | | |
| | | incision - 2/ | | | | |
| H0587 | Healing groin wound; 7.5 | Groin-Feb 19, 1997 | groin | | disease | pCMVSport 3.0 |
| | hours post incision | | | | | |
| H0590 | Human adult small intestine, | Human Adult Small | Small Int. | | | Uni-ZAP XR |
| | re-excision | Intestine | | | | |
| H0591 | Human T-cell lymphoma; | T-Cell Lymphoma | T-Cell | | disease | Uni-ZAP XR |
| | re-excision | | | | | |
| H0592 | Healing groin wound - zero | HGS wound healing | | | disease | pCMVSport 3.0 |
| | hr post-incision (control) | project; abdomen | | | | |
| H0593 | Olfactory epithelium; nasal | Olfactory epithelium | | | | pCMVSport 3.0 |
| | cavity | from roof of left | | | | |
| | | nasal cacit | | | | |
| H0594 | Human Lung Cancer; re- | Human Lang Cancer | Lung | | disease | Lambda ZAP II |
| | excision | | | | | |
| H0595 | Stomach cancer (human); re- | Stomach Cancer - | | | disease | Uni-ZAP XR |
| | excision | 5383A (human) | | | | |
| H0596 | Human Colon Cancer; re- | Human Colon | Colon | | | Lambda ZAP II |
| | excision | Cancer | | | | |
| H0597 | Human Colon; re-excision | Human Colon | | | | Lambda ZAP II |
| H0598 | Human Stomach; re- | Human Stomach | Stomach | | | Uni-ZAP XR |
| | excision | | | | | |
| H0599 | Human Adult Heart; re- | Human Adult Heart | Heart | | | Uni-ZAP XR |
| | excision | | | | | |
| H0600 | Healing Abdomen wound; | Abdomen | | | disease | pCMVSport 3.0 |
| | 70&90 min post incision | | | | | |
| H0601 | Healing Abdomen Wound; | Abdomen | | | disease | pCMVSport 3.0 |
| | 15 days post incision | | | | | |
| H0602 | Healing Abdomen Wound; | Abdomen | | | disease | pCMVSport 3.0 |
| | 21&29 days post incision | | | | | |
| H0604 | Human Pituitary, re- | Human Pituitary | | | | pBluescript |
| | excision | | | | | |
| H0606 | Human Primary Breast | Human Primary | Breast | | disease | Uni-ZAP XR |
| | Cancer; re-excision | Breast Cancer | | | | |
| H0610 | H. Leuksocytes, normalized | H. Leukocytes | | | | pCMVSport 1 |
| | cot 5A | | | | | |
| H0611 | H. Leukocytes, normalized | H. Leukocytes | | | | pCMVSport 1 |
| | cot 500 B | | | | | |
| H0615 | Human Ovarian Cancer | Ovarian Cancer | Ovary | | disease | Uni-ZAP XR |
| | Reexcision | | | | | |
| H0616 | Human Testes, Reexcision | Human Testes | Testis | | | Uni-ZAP XR |
| H0617 | Human Primary Breast | Human Primary | Breast | | disease | Uni-ZAP XR |
| | Cancer Reexcision | Breast Cancer | | | | |
| H0618 | Human Adult Testes, Large | Human Adult Testis | Testis | | | Uni-ZAP XR |
| | Inserts, Reexcision | | | | | |
| H0619 | Fetal Heart | Human Fetal Heart | Heart | | | Uni-ZAP XR |
| H0620 | Human Fetal Kidney; | Human Fetal Kidney | Kidney | | | Uni-ZAP XR |
| | Reexcision | | | | | |
| H0622 | Human Pancreas Tumor; | Human Pancreas | Pancreas | | disease | Uni-ZAP XR |
| | Reexcision | Tumor | | | | |
| H0623 | Human Umbilical Vein; | Human Umbilical | Umbilical vein | | | Uni-ZAP XR |
| | Reexcision | Vein Endothelial | | | | |
| | | Cells | | | | |
| H0624 | 12 Week Early Stage | Twelve Week Old | Embryo | | | Uni-ZAP XR |
| | Human II; Reexcision | Early Stage Human | | | | |
| H0625 | Ku 812F Basophils Line | Ku 812F Basophils | | | | pSport1 |
| H0626 | Saos2 Cells; Untreated | Saos2 Cell Line; | | | | pSport1 |
| | | Untreated | | | | |
| H0627 | Saos2 Cells; Vitamin D3 | Saos2 Cell Line; | | | | pSport1 |
| | Treated | Vitamin D3 Treated | | | | |
| H0628 | Human Pre-Differentiated | Human Pre- | | | | Uni-ZAP XR |
| | Adipocytes | Differentiated | | | | |
| | | Adipocytes | | | | |
| H0632 | Hepatocellular Tumor; re- | Hepatocellular | Liver | | | Lambda ZAP II |
| | excision | Tumor | | | | |
| H0633 | Lung Carcinoma A549 TNF | TNF alpha activated | | | disease | pSport1 |
| | alpha activated | A549--Lung | | | | |
| | | Carcinoma | | | | |
| H0634 | Human Testes Tumor, re- | Human Testes | Testis | | disease | Uni-ZAP XR |
| | excision | Tumor | | | | |
| H0635 | Human Activated T-Cells, | Activated T-Cells | Blood | Cell | | Uni-ZAP XR |
| | re-excision | | | Line | | |
| H0637 | Dendritic Cells From CD34 | Dentritic cells from | | | | pSport1 |
| | Cells | CD34 cells | | | | |
| H0638 | CD40 activated monocyte | CD40 activated | | | | pSport1 |
| | dendritic cells | monocyte dendritic | | | | |
| | | cells | | | | |
| H0640 | Ficolled Human Stromal | Ficolled Human | | | | Other |
| | Cells, Untreated | Stromal Cells, | | | | |
| | | Untreated | | | | |
| H0641 | LPS activated derived | LPS activated | | | | pSport1 |
| | dendritic cells | monocyte derived | | | | |
| | | dendritic cells | | | | |
| H0642 | Hep G2 Cells, lambda | Hep G2 Cells | | | | Other |
| | library | | | | | |
| H0643 | Hep G2 Cells, PCR library | Hep G2 Cells | | | | Other |
| H0644 | Human Placenta (re- | Human Placenta | Placenta | | | Uni-ZAP XR |
| | excision) | | | | | |
| H0645 | Fetal Heart, re-excision | Human Fetal Heart | Heart | | | Uni-ZAP XR |
| H0646 | Lung, Cancer (4005313A3): | Metastatic squamous | | | | pSport1 |
| | Invasive Poorly | cell lung carcinoma, | | | | |
| | Differentiated Lung | poorly di | | | | |
| | Adenocarcinoma, | | | | | |
| H0647 | Lung, Cancer (4005163B7): | Invasive poorly | | | disease | pSport1 |
| | Invasive, Poorly Diff. | differentiated lung | | | | |
| | Adenocarcinoma, Metastatic | adenocarcinoma | | | | |
| H0648 | Ovary, Cancer: (4004562B6); | Papillary Cystic | | | disease | pSport1 |
| | Papillary Serous Cystic | neoplasm of low | | | | |
| | Neoplasm, Low Malignant | malignant potential | | | | |
| | Potential | | | | | |
| H0649 | Lung, Normal: (4005313B1) | Normal Lung | | | | pSport1 |
| H0650 | B-Cells | B-Cells | | | | pCMVSport 3.0 |
| H0651 | Ovary, Normal: | Normal Ovary | | | | pSport1 |
| | (9805C040R) | | | | | |
| H0652 | Lung, Normal: (4005313B1) | Normal Lung | | | | pSport1 |
| H0653 | Stromal Cells | Stromal Cells | | | | pSport1 |
| H0656 | B-cells (unstimulated) | B-cells | | | | pSport1 |
| | | (unstimulated) | | | | |
| H0657 | B-cells (stimulated) | B-cells (stimulated) | | | | pSport1 |
| H0658 | Ovary, Cancer (9809C332): | 9809C332-Poorly | Ovary & | | disease | pSport1 |
| | Poorly differentiated | differentiate | Fallopian | | | |
| | adenocarcinoma | | Tubes | | | |
| H0659 | Ovary, Cancer (15395A1F): | Grade II Papillary | Ovary | | disease | pSport1 |
| | Grade II Papillary | Carcinoma, Ovary | | | | |
| | Carcinoma | | | | | |
| H0660 | Ovary, Cancer: (15799A1F) | Poorly differentiated | | | disease | pSport1 |
| | Poorly differentiated | carcinoma, ovary | | | | |
| | carcinoma | | | | | |
| H0661 | Breast, Cancer: (4004943A5) | Breast cancer | | | disease | pSport1 |
| H0662 | Breast, Normal: | Normal Breast - | Breast | | | pSport1 |
| | (4005522B2) | #4005522(B2) | | | | |
| H0663 | Breast, Cancer: (4005522A2) | Breast Cancer - | Breast | | disease | pSport1 |
| | | #4005522(A2) | | | | |
| H0664 | Breast, Cancer: | Breast Cancer | Breast | | disease | pSport1 |
| | (9806C012R) | | | | | |
| H0665 | Stromal cells 3.88 | Stromal cells 3.88 | | | | pSport1 |
| H0666 | Ovary, Cancer: (4004332A2) | Ovarian Cancer, | | | disease | pSport1 |
| | | Sample #4004332A2 | | | | |
| H0667 | Stromal cells(HBM3.18) | Stromal cell(HBM | | | | pSport1 |
| | | 3.18) | | | | |
| H0668 | stromal cell clone 2.5 | stromal cell clone | | | | pSport1 |
| | | 2.5 | | | | |
| H0669 | Breast, Cancer: (4005385A2) | Breast Cancer | Breast | | | pSport1 |
| | | (4005385A2) | | | | |
| H0670 | Ovary, Cancer(4004650A3): | Ovarian Cancer - | | | | pSport1 |
| | Well-Differentiated | 4004650A3 | | | | |
| | Micropapillary Serous | | | | | |
| | Carcinoma | | | | | |
| H0671 | Breast, Cancer: | Breast Cancer- | | | | pSport1 |
| | (9802C02OE) | Sample # | | | | |
| | | 9802C02OE | | | | |
| H0672 | Ovary, Cancer: (4004576A8) | Ovarian | Ovary | | | pSport1 |
| | | Cancer(4004576A8) | | | | |
| H0673 | Human Prostate Cancer, | Human Prostate | Prostate | | | Uni-ZAP XR |
| | Stage B2; re-excision | Cancer, stage B2 | | | | |
| H0674 | Human Prostate Cancer, | Human Prostate | Prostate | | | Uni-ZAP XR |
| | Stage C; re-excision | Cancer, stage C | | | | |
| H0675 | Colon, Cancer: | Colon Cancer | | | | pCMVSport 3.0 |
| | (9808C064R) | 9808C064R | | | | |
| H0676 | Colon, Cancer: | Colon Cancer | | | | pCMVSport 3.0 |
| | (9808C064R)-total RNA | 9808C064R | | | | |
| H0677 | TNFR degenerate oligo | B-Cells | | | | PCRII |
| H0682 | Serous Papillary | serous papillary | | | | pCMVSport 3.0 |
| | Adenocarcinoma | adenocarcinoma | | | | |
| | | (9606G304SPA3B) | | | | |
| H0683 | Ovarian Serous Papillary | Serous papillary | | | | pCMVSport 3.0 |
| | Adenocarcinoma | adenocarcinoma, | | | | |
| | | stage 3C (9804G01 | | | | |
| H0684 | Serous Papillary | Ovarian Cancer- | Ovaries | | | pCMVSport 3.0 |
| | Adenocarcinoma | 9810G606 | | | | |
| H0685 | Adenocarcinoma of Ovary, | Adenocarcinoma of | | | | pCMVSport 3.0 |
| | Human Cell Line, # | Ovary, Human Cell | | | | |
| | OVCAR-3 | Line, # OVCAR- | | | | |
| H0686 | Adenocarcinoma of Ovary, | Adenocarcinoma of | | | | pCMVSport 3.0 |
| | Human Cell Line | Ovary, Human Cell | | | | |
| | | Line, # SW-626 | | | | |
| H0687 | Human normal | Human normal ovary | Ovary | | | pCMVSport 3.0 |
| | ovary(#9610G215) | (#9610G215) | | | | |
| H0688 | Human Ovarian | Human ovarian | | | | pCMVSport 3.0 |
| | Cancer(#9807G017) | cancer | | | | |
| | | (#9807G017), mRNA | | | | |
| | | from Maura Ru | | | | |
| H0689 | Ovarian Cancer | Ovarian Cancer, | | | | pCMVSport 3.0 |
| | | #9806G019 | | | | |
| H0690 | Ovarian Cancer, # | Ovarian Cancer, | | | | pCMVSport 3.0 |
| | 9702G001 | #9702G001 | | | | |
| H0691 | Normal Ovary, #9710G208 | normal ovary, | | | | pCMVSport 3.0 |
| | | #9710G208 | | | | |
| H0692 | BLyS Receptor from | B Cell Lymphoma | B Cell | | | pCMVSport 3.0 |
| | Expression Cloning | | | | | |
| H0693 | Normal Prostate | Normal Prostate | | | | pCMVSport 3.0 |
| | #ODQ3958EN | Tissue # | | | | |
| | | ODQ3958EN | | | | |
| H0694 | Prostate gland | Prostate gland, | prostate gland | | | pCMVSport 3.0 |
| | adenocarcinoma | adenocarcinoma, | | | | |
| | | mod/diff, gleason | | | | |
| H0695 | mononucleocytes from | mononucleocytes | | | | pCMVSport 3.0 |
| | patient | from patient at | | | | |
| | | Shady Grove | | | | |
| | | Hospital | | | | |
| H0771 | Esophageal cancer | Esophageal cancer | esophagous | | disease | pCMVSport6 |
| N0006 | Human Fetal Brain | Human Fetal Brain | | | | |
| S0001 | Brain frontal cortex | Brain frontal cortex | Brain | | | Lambda ZAP II |
| S0002 | Monocyte activated | Monocyte-activated | blood | Cell | | Uni-ZAP XR |
| | | | | Line | | |
| S0003 | Human Osteoclastoma | Osteoclastoma | bone | | disease | Uni-ZAP XR |
| S0006 | Neuroblastoma | Human Neural | | | disease | pCDNA |
| | | Blastoma | | | | |
| S0007 | Early Stage Human Brain | Human Fetal Brain | | | | Uni-ZAP XR |
| S0010 | Human Amygdala | Amygdala | | | | Uni-ZAP XR |
| S0011 | STROMAL - | Osteoclastoma | bone | | disease | Uni-ZAP XR |
| | OSTEOCLASTOMA | | | | | |
| S0015 | Kidney medulla | Kidney medulla | Kidney | | | Uni-ZAP XR |
| S0016 | Kidney Pyramids | Kidney pyramids | Kidney | | | Uni-ZAP XR |
| S0022 | Human Osteoclastoma | Osteoclastoma | | | | Uni-ZAP XR |
| | Stromal Cells - unamplified | Stromal Cells | | | | |
| S0026 | Stromal cell TF274 | stromal cell | Bone marrow | Cell | | Uni-ZAP XR |
| | | | | Line | | |
| S0027 | Smooth muscle, serum | Smooth muscle | Pulmonary | Cell | | Uni-ZAP XR |
| | treated | | artery | Line | | |
| S0028 | Smooth muscle, control | Smooth muscle | Pulmonary | Cell | | Uni-ZAP XR |
| | | | artery | Line | | |
| S0030 | Brain pons | Brain Pons | Brain | | | Uni-ZAP XR |
| S0031 | Spinal cord | Spinal cord | spinal cord | | | Uni-ZAP XR |
| S0032 | Smooth muscle-ILb induced | Smooth muscle | Pulmonary | Cell | | Uni-ZAP XR |
| | | | artery | Line | | |
| S0036 | Human Substantia Nigra | Human Substantia | | | | Uni-ZAP XR |
| | | Nigra | | | | |
| S0037 | Smooth muscle, IL1b | Smooth muscle | Pulmanary | Cell | | Uni-ZAP XR |
| | induced | | artery | Line | | |
| S0038 | Human Whole Brain #2 - | Human Whole Brain | | | | ZAP Express |
| | Oligo dT > 1.5 Kb | #2 | | | | |
| S0040 | Adipocytes | Human Adipocytes | | | | Uni-ZAP XR |
| | | from Osteoclastoma | | | | |
| S0044 | Prostate BPH | prostate BPH | Prostate | | disease | Uni-ZAP XR |
| S0045 | Endothelial cells-control | Endothelial cell | endothelial | Cell | | Uni-ZAP XR |
| | | | cell-lung | Line | | |
| S0046 | Endothelial-induced | Endothelial cell | endothelial | Cell | | Uni-ZAP XR |
| | | | cell-lung | Line | | |
| S0049 | Human Brain, Striatum | Human Brain, | | | | Uni-ZAP XR |
| | | Striatum | | | | |
| S0050 | Human Frontal Cortex, | Human Frontal | | | disease | Uni-ZAP XR |
| | Schizophrenia | Cortex, | | | | |
| | | Schizophrenia | | | | |
| S0051 | Human Hypothalamus, | Human | | | disease | Uni-ZAP XR |
| | Schizophrenia | Hypothalamus, | | | | |
| | | Schizophrenia | | | | |
| S0052 | neutrophils control | human neutrophils | blood | Cell | | Uni-ZAP XR |
| | | | | Line | | |
| S0053 | Neutrophils IL-1 and LPS | human neutrophil | blood | Cell | | Uni-ZAP XR |
| | induced | induced | | Line | | |
| S0106 | striatum depression | | BRAIN | | disease | Uni-ZAP XR |
| S0110 | Brain Amygdala Depression | | Brain | | disease | Uni-ZAP XR |
| S0112 | Hypothalamus | | Brain | | | Uni-ZAP XR |
| S0114 | Anergic T-cell | Anergic T-cell | | Cell | | Uni-ZAP XR |
| | | | | Line | | |
| S0116 | Bone marrow | Bone marrow | Bone marrow | | | Uni-ZAP XR |
| S0122 | Osteoclastoma-normalized A | Osteoclastoma | bone | | disease | pBluescript |
| S0126 | Osteoblasts | Osteoblasts | Knee | Cell | | Uni-ZAP XR |
| | | | | Line | | |
| S0132 | Epithelial-TNFa and INF | Airway Epithelial | | | | Uni-ZAP XR |
| | induced | | | | | |
| S0134 | Apoptotic T-cell | apoptotic cells | | Cell | | Uni-ZAP XR |
| | | | | Line | | |
| S0142 | Macrophage-oxLDL | macrophage- | blood | Cell | | Uni-ZAP XR |
| | | oxidized LDL | | Line | | |
| | | treated | | | | |
| S0144 | Macrophage (GM-CSF | Macrophage (GM- | | | | Uni-ZAP XR |
| | treated) | CSF treated) | | | | |
| S0146 | prostate-edited | prostate BPH | Prostate | | | Uni-ZAP XR |
| S0148 | Normal Prostate | Prostate | prostate | | | Uni-ZAP XR |
| S0150 | LNCAP prostate cell line | LNCAP Cell Line | Prostate | Cell | | Uni-ZAP XR |
| | | | | Line | | |
| S0152 | PC3 Prostate cell line | PC3 prostate cell line | | | | Uni-ZAP XR |
| S0180 | Bone Marrow Stroma, | Bone Marrow | | | disease | Uni-ZAP XR |
| | TNF&LPS induced | Stroma, TNF & LPS | | | | |
| | | induced | | | | |
| S0182 | Human B Cell 8866 | Human B- Cell 8866 | | | | Uni-ZAP XR |
| S0188 | Prostate, BPH, Lib 2 | Human Prostate | | | disease | pSport1 |
| | | BPH | | | | |
| S0190 | Prostate BPH, Lib 2, | Human Prostate | | | | pSport1 |
| | subtracted | BPH | | | | |
| S0192 | Synovial Fibroblasts | Synovial Fibroblasts | | | | pSport1 |
| | (control) | | | | | |
| S0194 | Synovial hypoxia | Synovial Fibroblasts | | | | pSport1 |
| S0196 | Synovial IL-1/TNF | Synovial Fibroblasts | | | | pSport1 |
| | stimulated | | | | | |
| S0206 | Smooth Muscle- HASTE | Smooth muscle | Pulmonary | Cell | | pBluescript |
| | normalized | | artery | Line | | |
| S0210 | Mesangial cell, frac 2 | Mesangial cell | | | | pSport1 |
| S0212 | Bone Marrow Stromal Cell, | Bone Marrow | | | | pSport1 |
| | untreated | Stromal Cell, | | | | |
| | | untreated | | | | |
| S0214 | Human Osteoclastoma, re- | Osteoclastoma | bone | | disease | Uni-ZAP XR |
| | excision | | | | | |
| S0216 | Neutrophils IL-1 and LPS | human neutrophil | blood | Cell | | Uni-ZAP XR |
| | induced | induced | | Line | | |
| S0218 | Apoptotic T-cell, re- | apoptotic cells | | Cell | | Uni-ZAP XR |
| | excision | | | Line | | |
| S0220 | H. hypothalamus, frac A; re- | Hypothalamus | Brain | | | ZAP Express |
| | excision | | | | | |
| S0222 | H. Frontal cortex, epileptic; | H. Brain, Frontal | Brain | | disease | Uni-ZAP XR |
| | re-excision | Cortex, Epileptic | | | | |
| S0242 | Synovial Fibroblasts | Synovial Fibroblasts | | | | pSport1 |
| | (I11/TNF), subt | | | | | |
| S0250 | Human Osteoblasts II | Human Osteoblasts | Femur | | disease | pCMVSport 2.0 |
| S0260 | Spinal Cord, re-excision | Spinal cord | spinal cord | | | Uni-ZAP XR |
| S0262 | PYCS | Human Antrum | | | | PCRII |
| | | (PY_CS) | | | | |
| S0276 | Synovial hypoxia-RSF | Synovial fibroblasts | Synovial tissue | | | pSport1 |
| | subtracted | (rheumatoid) | | | | |
| S0278 | H Macrophage (GM-CSF | Macrophage (GM- | | | | Uni-ZAP XR |
| | treated), re-excision | CSF treated) | | | | |
| S0280 | Human Adipose Tissue, re- | Human Adipose | | | | Uni-ZAP XR |
| | excision | Tissue | | | | |
| S0282 | Brain Frontal Cortex, re- | Brain frontal cortex | Brain | | | Lambda ZAP II |
| | excision | | | | | |
| S0284 | 7TMCTT (Testis) | 7TMCTP (Placenta) | Testis | | | PCRII |
| S0286 | 7TMCTP (Placenta) | H7MCTP | Placenta | | | PCRII |
| | | (PLACENTA) | | | | |
| S0288 | 7TMCTK (Kidney) | 7TMCTK (Kidney) | Brain | | | PCRII |
| S0290 | H7TMCTB (Brain) | 7TMCTB (Brain) | Kidney | | | PCRII |
| S0292 | Osteoarthritis (OA-4) | Human | Bone | | disease | pSport1 |
| | | Osteoarthritic | | | | |
| | | Cartilage | | | | |
| S0298 | Bone marrow stroma, | Bone marrow | Bone marrow | | | pSport1 |
| | treated | stroma, treated SB | | | | |
| S0300 | Frontal lobe, dementia; re- | Frontal Lobe | Brain | | | Uni-ZAP XR |
| | excision | dementia/Alzheimer's | | | | |
| S0302 | Adrenergic 7TMR | Human Brain whole | whole brain | | | PCRII |
| S0306 | Larynx normal #10 261-273 | Larynx normal | | | | pSport1 |
| S0310 | Normal trachea | Normal trachea | | | | pSport1 |
| S0312 | Human osteoarthritic; | Human osteoarthritic | | | disease | pSport1 |
| | fraction II | cartilage | | | | |
| S0314 | Human osteoarthritis; | Human osteoarthritic | | | disease | pSport1 |
| | fraction I | cartilage | | | | |
| S0316 | Human Normal Cartilage, | Human Normal | | | | pSport1 |
| | Fraction I | Cartilage | | | | |
| S0318 | Human Normal Cartilage | Human Normal | | | | pSport1 |
| | Fraction II | Cartilage | | | | |
| S0328 | Palate carcinoma | Palate carcinoma | Uvula | | disease | pSport1 |
| S0330 | Palate normal | Palate normal | Uvula | | | pSport1 |
| S0334 | Human Normal Cartilage | Human Normal | | | | pSport1 |
| | Fraction III | Cartilage | | | | |
| S0336 | Human Normal Cartilage | Human Normal | | | | pSport1 |
| | Fraction IV | Cartilage | | | | |
| S0340 | Human Osteoarthritic | Human osteoarthritic | | | disease | pSport1 |
| | Cartilage Fraction IV | cartilage | | | | |
| S0342 | Adipocytes; re-excision | Human Adipocytes | | | | Uni-ZAP XR |
| | | from Osteoclastoma | | | | |
| S0344 | Macrophage-oxLDL; re- | macrophage- | blood | Cell | | Uni-ZAP XR |
| | excision | oxidized LDL | | Line | | |
| | | treated | | | | |
| S0346 | Human Amygdala; re- | Amygdala | | | | Uni-ZAP XR |
| | excision | | | | | |
| S0348 | Cheek Carcinoma | Cheek Carcinoma | | | disease | pSport1 |
| S0350 | Pharynx Carcinoma | Pharynx carcinoma | Hypopharynx | | disease | pSport1 |
| S0352 | Larynx Carcinoma | Larynx carcinoma | | | disease | pSport1 |
| S0354 | Colon Normal II | Colon Normal | Colon | | | pSport1 |
| S0356 | Colon Carcinoma | Colon Carcinoma | Colon | | disease | pSport1 |
| S0358 | Colon Normal III | Colon Normal | Colon | | | pSport1 |
| S0360 | Colon Tumor II | Colon Tumor | Colon | | disease | pSport1 |
| S0362 | Human Gastrocnemius | Gastrocnemius | | | | pSport1 |
| | | muscle | | | | |
| S0364 | Human Quadriceps | Quadriceps muscle | | | | pSport1 |
| S0366 | Human Soleus | Soleus Muscle | | | | pSport1 |
| S0368 | Human Pancreatic | Islets of Langerhans | | | | pSport1 |
| | Langerhans | | | | | |
| S0370 | Larynx carcinoma II | Larynx carcinoma | | | disease | pSport1 |
| S0374 | Normal colon | Normal colon | | | | pSport1 |
| S0376 | Colon Tumor | Colon Tumor | | | disease | pSport1 |
| S0378 | Pancreas normal PCA4 No | Pancreas Normal | | | | pSport1 |
| | | PCA4 No | | | | |
| S0380 | Pancreas Tumor PCA4 | Pancreas Tumor | | | disease | pSport1 |
| | Tumor | PCA4 Tumor | | | | |
| S0382 | Larynx carcinoma IV | Larynx carcinoma | | | disease | pSport1 |
| S0384 | Tongue carcinoma | Tongue carcinoma | | | disease | pSport1 |
| S0386 | Human Whole Brain, re- | Whole brain | Brain | | | ZAP Express |
| | excision | | | | | |
| S0388 | Human Hypothalamus, | Human | | | disease | Uni-ZAP XR |
| | schizophrenia, re-excision | Hypothalamus, | | | | |
| | | Schizophrenia | | | | |
| S0390 | Smooth muscle, control; re- | Smooth muscle | Pulmonary | Cell | | Uni-ZAP XR |
| | excision | | artery | Line | | |
| S0392 | Salivary Gland | Salivary gland; | | | | pSport1 |
| | | normal | | | | |
| S0402 | Adrenal Gland, normal | Adrenal gland; | | | | pSport1 |
| | | normal | | | | |
| S0404 | Rectum normal | Rectum, normal | | | | pSport1 |
| S0406 | Rectum tumor | Rectum tumor | | | | pSport1 |
| S0408 | Colon, normal | Colon, normal | | | | pSport1 |
| S0410 | Colon, tumor | Colon, tumor | | | | pSport1 |
| S0412 | Temporal cortex-Alzheimer; | Temporal cortex, | | | disease | Other |
| | subtracted | Alzheimer | | | | |
| S0418 | CHME Cell Line; treated 5 hrs | CHME Cell Line; | | | | pCMVSport 3.0 |
| | | treated | | | | |
| S0420 | CHME Cell Line, untreated | CHME Cell line, | | | | pSport1 |
| | | untreated | | | | |
| S0422 | Mo7e Cell Line GM-CSF | Mo7e Cell Line GM- | | | | pCMV Sport 3.0 |
| | treated (1 ng/ml) | CSF treated (1 ng/ml) | | | | |
| S0424 | TF-1 Cell Line GM-CSF | TF-1 Cell Line GM- | | | | pSport1 |
| | Treated | CSF Treated | | | | |
| S0426 | Monocyte activated; re- | Monocyte-activated | blood | Cell | | Uni-ZAP XR |
| | excision | | | Line | | |
| S0428 | Neutrophils control; re- | human neutrophils | blood | Cell | | Uni-ZAP XR |
| | excision | | | Line | | |
| S0430 | Aryepiglottis Normal | Aryepiglottis Normal | | | | pSport1 |
| S0432 | Sinus piniformis Tumor | Sinus piniformis | | | | pSport1 |
| | | Tumor | | | | |
| S0434 | Stomach Normal | Stomach Normal | | | disease | pSport1 |
| S0436 | Stomach Tumor | Stomach Tumor | | | disease | pSport1 |
| S0438 | Liver Normal Met5 No | Liver Normal | | | | pSport1 |
| | | Met5No | | | | |
| S0440 | Liver Tumor Met 5 Tu | Liver Tumor | | | | pSport1 |
| S0442 | Colon Normal | Colon Normal | | | | pSport1 |
| S0444 | Colon Tumor | Colon Tumor | | | disease | pSport1 |
| S0446 | Tongue Tumor | Tongue Tumor | | | | pSport1 |
| S0448 | Larynx Normal | Larynx Normal | | | | pSport1 |
| S0450 | Larynx Tumor | Larynx Tumor | | | | pSport1 |
| S0452 | Thymus | Thymus | | | | pSport1 |
| S0454 | Placenta | Placenta | Placenta | | | pSport1 |
| S0456 | Tongue Normal | Tongue Normal | | | | pSport1 |
| S0460 | Thyroid Tumor | Thyroid Tumor | | | | pSport1 |
| S0464 | Larynx Normal | Larynx Normal | | | | pSport1 |
| S0466 | Larynx Tumor | Larynx Tumor | | | disease | pSport1 |
| S0468 | Ea.hy.926 cell line | Ea.hy.926 cell line | | | | pSport1 |
| S0474 | Human blood platelets | Platelets | Blood platelets | | | Other |
| S3012 | Smooth Muscle Serum | Smooth muscle | Pulmonary | Cell | | pBluescript |
| | Treated, Norm | | artery | Line | | |
| S3014 | Smooth muscle, serum | Smooth muscle | Pulmonary | Cell | | pBluescript |
| | induced, re-exc | | artery | Line | | |
| S6014 | H. hypothalamus, frac A | Hypothalamus | Brain | | | ZAP Express |
| S6016 | H. Frontal Cortex, Epileptic | H. Brain, Frontal | Brain | | disease | Uni-ZAP XR |
| | | Cortex, Epileptic | | | | |
| S6022 | H. Adipose Tissue | Human Adipose | | | | Uni-ZAP XR |
| | | Tissue | | | | |
| S6024 | Alzheimers, spongy change | Alzheimer's/Spongy | Brain | | disease | Uni-ZAP XR |
| | | change | | | | |
| S6028 | Human Manic Depression | Human Manic | Brain | | disease | Uni-ZAP XR |
| | Tissue | depression tissue | | | | |
| T0002 | Activated T-cells | Activated T-Cell, | Blood | Cell | | pBluescript SK− |
| | | PBL fraction | | Line | | |
| T0003 | Human Fetal Lung | Human Fetal Lung | | | | pBluescript SK− |
| T0004 | Human White Fat | Human White Fat | | | | pBluescript SK− |
| T0006 | Human Pineal Gland | Human Pineal Gland | | | | pBluescript SK− |
| T0008 | Colorectal Tumor | Colorectal Tumor | | | disease | pBluescript SK− |
| T0010 | Human Infant Brain | Human Infant Brain | | | | Other |
| T0023 | Human Pancreatic | Human Pancreatic | | | disease | pBluescript SK− |
| | Carcinoma | Carcinoma | | | | |
| T0039 | HSA 172 Cells | Human HSA172 cell | | | | pBluescript SK− |
| | | line | | | | |
| T0040 | HSC172 cells | SA172 Cells | | | | pBluescript SK− |
| T0041 | Jurkat T-cell G1 phase | Jurkat T-cell | | | | pBluescript SK− |
| T0042 | Jurkat T-Cell, S phase | Jurkat T-Cell Line | | | | pBluescript SK− |
| T0047 | T lymphocytes > 70 | T lymphocytes > 70 | | | | pBluescript SK− |
| T0048 | Human Aortic Endothelium | Human Aortic | | | | pBluescript SK− |
| | | Endothelium | | | | |
| T0049 | Aorta endothelial cells + TNF-a | Aorta endothelial | | | | pBluescript SK− |
| | | cells | | | | |
| T0060 | Human White Adipose | Human White Fat | | | | pBluescript SK− |
| T0067 | Human Thyroid | Human Thyroid | | | | pBluescript SK− |
| T0069 | Human Uterus, normal | Human Uterus, | | | | pBluescript SK− |
| | | normal | | | | |
| T0070 | Human Adrenal Gland | Human Adrenal | | | | pBluescript SK− |
| | | Gland | | | | |
| T0082 | Human Adult Retina | Human Adult Retina | | | | pBluescript SK− |
| T0103 | Human colon carcinoma | | | | | pBluescript SK− |
| | (HCC) cell line | | | | | |
| T0114 | Human (Caco-2) cell line, | | | | | pBluescript SK− |
| | adenocarcinoma, colon, | | | | | |
| | remake | | | | | |
| L0002 | Atrium cDNA library | | | | | |
| | Human heart | | | | | |
| L0005 | Clontech human aorta | | | | | |
| | polyA+ mRNA (#6572) | | | | | |
| L0021 | Human adult (K. Okubo) | | | | | |
| L0022 | Human adult lung 3″ | | | | | |
| | directed MboI cDNA | | | | | |
| L0040 | Human colon mucosa | | | | | |
| L0041 | Human epidermal | | | | | |
| | keratinocyte | | | | | |
| L0055 | Human promyelocyte | | | | | |
| L0065 | Liver HepG2 cell line. | | | | | |
| L0105 | Human aorta polyA+ | aorta | | | | |
| | (TFujiwara) | | | | | |
| L0141 | Human pancreatic islet cell | pancreatic islet | | | | |
| L0142 | Human placenta cDNA | placenta | | | | |
| | (TFujiwara) | | | | | |
| L0143 | Human placenta polyA+ | placenta | | | | |
| | (TFujiwara) | | | | | |
| L0163 | Human heart cDNA | | heart | | | |
| | (YNakamura) | | | | | |
| L0351 | Infant brain, Bento Soares | | | | | BA, M13-derived |
| L0352 | Normalized infant brain, | | | | | BA, M13-derived |
| | Bento Soares | | | | | |
| L0361 | Stratagene ovary (#937217) | | ovary | | | Bluescript SK |
| L0362 | Stratagene ovarian cancer | | | | | Bluescript SK− |
| | (#937219) | | | | | |
| L0363 | NCI_CGAP_GC2 | germ cell tumor | | | | Bluescript SK− |
| L0364 | NCI_CGAP_GC5 | germ cell tumor | | | | Bluescript SK− |
| L0366 | Stratagene schizo brain S11 | schizophrenic brain | | | | Bluescript SK− |
| | | S-11 frontal lobe | | | | |
| L0367 | NCI_CGAP_Sch1 | Schwannoma tumor | | | | Bluescript SK− |
| L0368 | NCI_CGAP_SS1 | synovial sarcoma | | | | Bluescript SK− |
| L0369 | NCI_CGAP_AA1 | adrenal adenoma | adrenal gland | | | Bluescript SK− |
| L0371 | NCI_CGAP_Br3 | breast tumor | breast | | | Bluescript SK− |
| L0372 | NCI_CGAP_Co12 | colon tumor | colon | | | Bluescript SK− |
| L0373 | NCI_CGAP_Co11 | tumor | colon | | | Bluescript SK− |
| L0374 | NCI_CGAP_Co2 | tumor | colon | | | Bluescript SK− |
| L0375 | NCI_CGAP_Kid6 | kidney tumor | kidney | | | Bluescript SK− |
| L0376 | NCI_CGAP_Lar1 | larynx | larynx | | | Bluescript SK− |
| L0378 | NCI_CGAP_Lu1 | lung tumor | lung | | | Bluescript SK− |
| L0379 | NCI_CGAP_Lym3 | lymphoma | lymph node | | | Bluescript SK− |
| L0381 | NCI_CGAP_HN4 | squamous cell | pharynx | | | Bluescript SK− |
| | | carcinoma | | | | |
| L0382 | NCI_CGAP_Pr25 | epithelium (cell line) | prostate | | | Bluescript SK− |
| L0383 | NCI_CGAP_Pr24 | invasive tumor (cell | prostate | | | Bluescript SK− |
| | | line) | | | | |
| L0384 | NCI_CGAP_Pr23 | prostate tumor | prostate | | | Bluescript SK− |
| L0386 | NCI_CGAP_HN3 | squamous cell | tongue | | | Bluescript SK− |
| | | carcinoma from base | | | | |
| | | of tongue | | | | |
| L0387 | NCI_CGAP_GCB0 | germinal center B- | tonsil | | | Bluescript SK− |
| | | cells | | | | |
| L0388 | NCI_CGAP_HN6 | normal gingiva (cell | | | | Bluescript SK− |
| | | line from | | | | |
| | | immortalized | | | | |
| | | keratinocyte | | | | |
| L0393 | B, Human Liver tissue | | | | | gt11 |
| L0411 | 1-NIB | | | | | Lafmid BA |
| L0415 | b4HB3MA Cot8-HAP-Ft | | | | | Lafmid BA |
| L0418 | b4HB3MA-Cot109 + 10-Bio | | | | | Lafmid BA |
| L0435 | Infant brain, LLNL array of | | | | | lafmid BA |
| | Dr. M. Soares 1NIB | | | | | |
| L0438 | normalized infant brain | total brain | brain | | | lafmid BA |
| | cDNA | | | | | |
| L0439 | Soares infant brain 1NIB | | whole brain | | | Lafmid BA |
| L0446 | N4HB3MK | | | | | Lafmid BK |
| L0455 | Human retina cDNA | retina | eye | | | lambda gt10 |
| | randomly primed sub- | | | | | |
| | library | | | | | |
| L0456 | Human retina cDNA | retina | eye | | | lambda gt10 |
| | Tsp509I-cleaved sub-library | | | | | |
| L0471 | Human fetal heart, Lambda | | | | | Lambda ZAP |
| | ZAP Express | | | | | Express |
| L0475 | KG1-a Lambda Zap Express | | | KG1-a | | Lambda Zap |
| | cDNA library | | | | | Express |
| | | | | | | (Stratagene) |
| L0483 | Human pancreatic islet | | | | | Lambda ZAPII |
| L0485 | STRATAGENE Human | skeletal muscle | leg muscle | | | Lambda ZAPII |
| | skeletal muscle cDNA | | | | | |
| | library, cat. #936215. | | | | | |
| L0493 | NCI_CGAP_Ov26 | papillary serous | ovary | | | pAMP1 |
| | | carcinoma | | | | |
| L0499 | NCI_CGAP_HSC2 | stem cell 34+/38+ | bone marrow | | | pAMP1 |
| L0500 | NCI_CGAP_Brn20 | oligodendroglioma | brain | | | pAMP1 |
| L0502 | NCI_CGAP_Br15 | adenocarcinoma | breast | | | pAMP1 |
| L0504 | NCI_CGAP_Br13 | breast carcinoma in | breast | | | pAMP1 |
| | | situ | | | | |
| L0506 | NCI_CGAP_Br16 | lobular carcinoma in | breast | | | pAMP1 |
| | | situ | | | | |
| L0509 | NCI_CGAP_Lu26 | invasive | lung | | | pAMP1 |
| | | adenocarcinoma | | | | |
| L0510 | NCI_CGAP_Ov33 | borderline ovarian | ovary | | | pAMP1 |
| | | carcinoma | | | | |
| L0511 | NCI_CGAP_Ov34 | borderline ovarian | ovary | | | pAMP1 |
| | | carcinoma | | | | |
| L0512 | NCI_CGAP_Ov36 | borderline ovarian | ovary | | | pAMP1 |
| | | carcinoma | | | | |
| L0515 | NCI_CGAP_Ov32 | papillary serous | ovary | | | pAMP1 |
| | | carcinoma | | | | |
| L0517 | NCI_CGAP_Pr1 | | | | | pAMP10 |
| L0518 | NCI_CGAP_Pr2 | | | | | pAMP10 |
| L0519 | NCI_CGAP_Pr3 | | | | | pAMP10 |
| L0520 | NCI_CGAP_Alv1 | alveolar | | | | pAMP10 |
| | | rhabdomyosarcoma | | | | |
| L0521 | NCI_CGAP_Ew1 | Ewing's sarcoma | | | | pAMP10 |
| L0522 | NCI_CGAP_Kid1 | kidney | | | | pAMP10 |
| L0523 | NCI_CGAP_Lip2 | liposarcoma | | | | pAMP10 |
| L0526 | NCI_CGAP_Pr12 | metastatic prostate | | | | pAMP10 |
| | | bone lesion | | | | |
| L0527 | NCI_CGAP_Ov2 | ovary | | | | pAMP10 |
| L0528 | NCI_CGAP_Pr5 | prostate | | | | pAMP10 |
| L0529 | NCI_CGAP_Pr6 | prostate | | | | pAMP10 |
| L0530 | NCI_CGAP_Pr8 | prostate | | | | pAMP10 |
| L0531 | NCI_CGAP_Pr20 | prostate metastasis, | | | | pAMP10 |
| | | liver | | | | |
| L0532 | NCI_CGAP_Thy1 | thyroid | | | | pAMP10 |
| L0540 | NCI_CGAP_Pr10 | invasive prostate | prostate | | | pAMP10 |
| | | tumor | | | | |
| L0541 | NCI_CGAP_Pr7 | low-grade prostatic | prostate | | | pAMP10 |
| | | neoplasia | | | | |
| L0543 | NCI_CGAP_Pr9 | normal prostatic | prostate | | | pAMP10 |
| | | epithelial cells | | | | |
| L0544 | NCI_CGAP_Pr4 | prostatic | prostate | | | pAMP10 |
| | | intraepithelial | | | | |
| | | neoplasia - high | | | | |
| | | grade | | | | |
| L0545 | NCI_CGAP_Pr4.1 | prostatic | prostate | | | pAMP10 |
| | | intraepithelial | | | | |
| | | neoplasia - high | | | | |
| | | grade | | | | |
| L0547 | NCI_CGAP_Pr16 | tumor | prostate | | | pAMP10 |
| L0553 | NCI_CGAP_Co22 | colonic | colon | | | pAMP10 |
| | | adenocarcinoma | | | | |
| L0555 | NCI_CGAP_Lu34 | large cell carcinoma | lung | | | pAMP10 |
| L0558 | NCI_CGAP_Ov40 | endometrioid ovarian | ovary | | | pAMP10 |
| | | metastasis | | | | |
| L0559 | NCI_CGAP_Ov39 | papillary serous | ovary | | | pAMP10 |
| | | ovarian metastasis | | | | |
| L0560 | NCI_CGAP_HN12 | moderate to poorly | tongue | | | pAMP10 |
| | | differentiated | | | | |
| | | invasive carcinoma | | | | |
| L0561 | NCI_CGAP_HN11 | normal squamous | tongue | | | pAMP10 |
| | | epithelium | | | | |
| L0564 | Jia bone marrow stroma | bone marrow stroma | | | | pBluescript |
| L0565 | Normal Human Trabecular | Bone | Hip | | | pBluescript |
| | Bone Cells | | | | | |
| L0581 | Stratagene liver (#937224) | | liver | | | pBluescript SK |
| L0586 | HTCDL1 | | | | | pBluescript SK(−) |
| L0588 | Stratagene endothelial cell | | | | | pBluescript SK− |
| | 937223 | | | | | |
| L0589 | Stratagene fetal retina | | | | | pBluescript SK− |
| | 937202 | | | | | |
| L0591 | Stratagene HeLa cell s3 | | | | | pBluescript SK− |
| | 937216 | | | | | |
| L0592 | Stratagene hNT neuron | | | | | pBluescript SK− |
| | (#937233) | | | | | |
| L0593 | Stratagene neuroepithelium | | | | | pBluescript SK− |
| | (#937231) | | | | | |
| L0595 | Stratagene NT2 neuronal | neuroepithelial cells | brain | | | pBluescript SK− |
| | precursor 937230 | | | | | |
| L0596 | Stratagene colon (#937204) | | colon | | | pBluescript SK− |
| L0597 | Stratagene corneal stroma | | cornea | | | pBluescript SK− |
| | (#937222) | | | | | |
| L0598 | Morton Fetal Cochlea | cochlea | ear | | | pBluescript SK− |
| L0599 | Stratagene lung (#937210) | | lung | | | pBluescript SK− |
| L0600 | Weizmann Olfactory | olfactory epithelium | nose | | | pBluescript SK− |
| | Epithelium | | | | | |
| L0601 | Stratagene pancreas | | pancreas | | | pBluescript SK− |
| | (#937208) | | | | | |
| L0602 | Pancreatic Islet | pancreatic islet | pancreas | | | pBluescript SK− |
| L0603 | Stratagene placenta | | placenta | | | pBluescript SK− |
| | (#937225) | | | | | |
| L0604 | Stratagene muscle 937209 | muscle | skeletal muscle | | | pBluescript SK− |
| L0605 | Stratagene fetal spleen | fetal spleen | spleen | | | pBluescript SK− |
| | (#937205) | | | | | |
| L0606 | NCI_CGAP_Lym5 | follicular lymphoma | lymph node | | | pBluescript SK− |
| L0607 | NCI_CGAP_Lym6 | mantle cell | lymph node | | | pBluescript SK− |
| | | lymphoma | | | | |
| L0608 | Stratagene lung carcinoma | lung carcinoma | lung | NCI- | | pBluescript SK− |
| | 937218 | | | H69 | | |
| L0609 | Schiller astrocytoma | astrocytoma | brain | | | pBluescript SK− |
| | | | | | | (Stratagene) |
| L0611 | Schiller meningioma | meningioma | brain | | | pBluescript SK− |
| | | | | | | (Stratagene) |
| L0615 | 22 week old human fetal | | | | | pBluescriptII SK(−) |
| | liver cDNA library | | | | | |
| L0623 | HM3 | pectoral muscle | | | | pcDNAII |
| | | (after mastectomy) | | | | (Invitrogen) |
| L0626 | NCI_CGAP_GC1 | bulk germ cell | | | | pCMV-SPORT2 |
| | | seminoma | | | | |
| L0627 | NCI_CGAP_Co1 | bulk tumor | colon | | | pCMV-SPORT2 |
| L0629 | NCI_CGAP_Mel3 | metastatic melanoma | bowel (skin | | | pCMV-SPORT4 |
| | | to bowel | primary) | | | |
| L0631 | NCI_CGAP_Br7 | | breast | | | pCMV-SPORT4 |
| L0634 | NCI_CGAP_Ov8 | serous | ovary | | | pCMV-SPORT4 |
| | | adenocarcinoma | | | | |
| L0635 | NCI_CGAP_PNS1 | dorsal root ganglion | peripheral | | | pCMV-SPORT4 |
| | | | nervous system | | | |
| L0636 | NCI_CGAP_Pit1 | four pooled pituitary | brain | | | pCMV-SPORT6 |
| | | adenomas | | | | |
| L0637 | NCI_CGAP_Brn53 | three pooled | brain | | | pCMV-SPORT6 |
| | | meningiomas | | | | |
| L0638 | NCI_CGAP_Brn35 | tumor, 5 pooled (see | brain | | | pCMV-SPORT6 |
| | | description) | | | | |
| L0639 | NCI_CGAP_Brn52 | tumor, 5 pooled (see | brain | | | pCMV-SPORT6 |
| | | description) | | | | |
| L0640 | NCI_CGAP_Br18 | four pooled high- | breast | | | pCMV-SPORT6 |
| | | grade tumors, | | | | |
| | | including two prima | | | | |
| L0641 | NCI_CGAP_Co17 | juvenile granulosa | colon | | | pCMV-SPORT6 |
| | | tumor | | | | |
| L0642 | NCI_CGAP_Co18 | moderately | colon | | | pCMV-SPORT6 |
| | | differentiated | | | | |
| | | adenocarcinoma | | | | |
| L0643 | NCI_CGAP_Co19 | moderately | colon | | | pCMV-SPORT6 |
| | | differentiated | | | | |
| | | adenocarcinoma | | | | |
| L0644 | NCI_CGAP_Co20 | moderately | colon | | | pCMV-SPORT6 |
| | | differentiated | | | | |
| | | adenocarcinoma | | | | |
| L0645 | NCI_CGAP_Co21 | moderately | colon | | | pCMV-SPORT6 |
| | | differentiated | | | | |
| | | adenocarcinoma | | | | |
| L0646 | NCI_CGAP_Co14 | moderately- | colon | | | pCMV-SPORT6 |
| | | differentiated | | | | |
| | | adenocarcinoma | | | | |
| L0648 | NCI_CGAP_Eso2 | squamous cell | esophagus | | | pCMV-SPORT6 |
| | | carcinoma | | | | |
| L0649 | NCI_CGAP_GU1 | 2 pooled high-grade | genitourinary | | | pCMV-SPORT6 |
| | | transitional cell | tract | | | |
| | | tumors | | | | |
| L0650 | NCI_CGAP_Kid13 | 2 pooled Wilms' | kidney | | | pCMV-SPORT6 |
| | | tumors, one primary | | | | |
| | | and one metastatic | | | | |
| L0651 | NCI_CGAP_Kid8 | renal cell tumor | kidney | | | pCMV-SPORT6 |
| L0652 | NCI_CGAP_Lu27 | four pooled poorly- | lung | | | pCMV-SPORT6 |
| | | differentiated | | | | |
| | | adenocarcinomas | | | | |
| L0653 | NCI_CGAP_Lu28 | two pooled | lung | | | pCMV-SPORT6 |
| | | squamous cell | | | | |
| | | carcinomas | | | | |
| L0654 | NCI_CGAP_Lu31 | | lung, cell line | | | pCMV-SPORT6 |
| L0655 | NCI_CGAP_Lym12 | lymphoma, follicular | lymph node | | | pCMV-SPORT6 |
| | | mixed small and | | | | |
| | | large cell | | | | |
| L0656 | NCI_CGAP_Ov38 | normal epithelium | ovary | | | pCMV-SPORT6 |
| L0657 | NCI_CGAP_Ov23 | tumor, 5 pooled (see | ovary | | | pCMV-SPORT6 |
| | | description) | | | | |
| L0658 | NCI_CGAP_Ov35 | tumor, 5 pooled (see | ovary | | | pCMV-SPORT6 |
| | | description) | | | | |
| L0659 | NCI_CGAP_Pan1 | adenocarcinoma | pancreas | | | pCMV-SPORT6 |
| L0661 | NCI_CGAP_Mel15 | malignant | skin | | | pCMV-SPORT6 |
| | | melanoma, | | | | |
| | | metastatic to lymph | | | | |
| | | node | | | | |
| L0662 | NCI_CGAP_Gas4 | poorly differentiated | stomach | | | pCMV-SPORT6 |
| | | adenocarcinoma with | | | | |
| | | signet r | | | | |
| L0663 | NCI_CGAP_Ut2 | moderately- | uterus | | | pCMV-SPORT6 |
| | | differentiated | | | | |
| | | endometrial | | | | |
| | | adenocarcinoma | | | | |
| L0664 | NCI_CGAP_Ut3 | poorly-differentiated | uterus | | | pCMV-SPORT6 |
| | | endometrial | | | | |
| | | adenocarcinoma, | | | | |
| L0665 | NCI_CGAP_Ut4 | serous papillary | uterus | | | pCMV-SPORT6 |
| | | carcinoma, high | | | | |
| | | grade, 2 pooled t | | | | |
| L0666 | NCI_CGAP_Ut1 | well-differentiated | uterus | | | pCMV-SPORT6 |
| | | endometrial | | | | |
| | | adenocarcinoma, 7 | | | | |
| L0667 | NCI_CGAP_CML1 | myeloid cells, 18 | whole blood | | | pCMV-SPORT6 |
| | | pooled CML cases, | | | | |
| | | BCR/ABL | | | | |
| | | rearranged | | | | |
| L0697 | Testis 1 | | | | | PGEM 5zf(+) |
| L0708 | NIH_MGC_17 | rhabdomyosarcoma | muscle | | | pOTB7 |
| L0709 | NIH_MGC_21 | choriocarcinoma | placenta | | | pOTB7 |
| L0710 | NIH_MGC_7 | small cell carcinoma | lung | MGC3 | | pOTB7 |
| L0716 | PMA-induced HL60 cell | | | PMA- | | pSPORT 1 |
| | subtraction library | | | induced | | |
| | | | | HL60 | | |
| | | | | human | | |
| | | | | leukemic | | |
| | | | | cell | | |
| | | | | line | | |
| L0717 | Gessler Wilms tumor | | | | | pSPORT1 |
| L0718 | Testis 5 | | | | | pSPORT1 |
| L0731 | Soares_pregnant_uterus_Nb | | uterus | | | pT7T3-Pac |
| | HPU | | | | | |
| L0738 | Human colorectal cancer | | | | | pT7T3D |
| L0740 | Soares melanocyte 2NbHM | melanocyte | | | | pT7T3D |
| | | | | | | (Pharmacia) with a |
| | | | | | | modified polylinker |
| L0741 | Soares adult brain | | brain | | | pT7T3D |
| | N2b4HB55Y | | | | | (Pharmacia) with a |
| | | | | | | modified polylinker |
| L0742 | Soares adult brain | | brain | | | pT7T3D |
| | N2b5HB55Y | | | | | (Pharmacia) with a |
| | | | | | | modified polylinker |
| L0743 | Soares breast 2NbHBst | | breast | | | pT7T3D |
| | | | | | | (Pharmacia) with a |
| | | | | | | modified polylinker |
| L0744 | Soares breast 3NbHBst | | breast | | | pT7T3D |
| | | | | | | (Pharmacia) with a |
| | | | | | | modified polylinker |
| L0745 | Soares retina N2b4HR | retina | eye | | | pT7T3D |
| | | | | | | (Pharmacia) with a |
| | | | | | | modified polylinker |
| L0746 | Soares retina N2b5HR | retina | eye | | | pT7T3D |
| | | | | | | (Pharmacia) with a |
| | | | | | | modified polylinker |
| L0747 | Soares_fetal_heart_NbHH19W | | heart | | | pT7T3D |
| | | | | | | (Pharmacia) with a |
| | | | | | | modified polylinker |
| L0748 | Soares fetal liver spleen | | Liver and | | | pT7T3D |
| | 1NFLS | | Spleen | | | (Pharmacia) with a |
| | | | | | | modified polylinker |
| L0749 | Soares_fetal_liver_spleen_1NFLS_{—} | | Liver and | | | pT7T3D |
| | S1 | | Spleen | | | (Pharmacia) with a |
| | | | | | | modified polylinker |
| L0750 | Soares_fetal_lung_NbHL19W | | lung | | | pT7T3D |
| | | | | | | (Pharmacia) with a |
| | | | | | | modified polylinker |
| L0751 | Soares ovary tumor NbHOT | ovarian tumor | ovary | | | pT7T3D |
| | | | | | | (Pharmacia) with a |
| | | | | | | modified polylinker |
| L0752 | Soares_parathyroid_tumor_{—} | parathyroid tumor | parathyroid | | | pT7T3D |
| | NbHPA | | gland | | | (Pharmacia) with a |
| | | | | | | modified polylinker |
| L0753 | Soares_pineal_gland_N3HPG | | pineal gland | | | pT7T3D |
| | | | | | | (Pharmacia) with a |
| | | | | | | modified polylinker |
| L0754 | Soares placenta Nb2HP | | placenta | | | pT7T3D |
| | | | | | | (Pharmacia) with a |
| | | | | | | modified polylinker |
| L0755 | Soares_placenta_8to9weeks_{—} | | placenta | | | pT7T3D |
| | 2NbHP8to9W | | | | | (Pharmacia) with a |
| | | | | | | modified polylinker |
| L0756 | Soares_multiple_sclerosis_2NbHMSP | multiple sclerosis | | | | pT7T3D |
| | | lesions | | | | (Pharmacia) with a |
| | | | | | | modified polylinker |
| | | | | | | V_TYPE |
| L0757 | Soares_senescent_fibroblast | senescent fibroblast | | | | pT7T3D |
| | s_NbHSF | | | | | (Pharmacia) with a |
| | | | | | | modified polylinker |
| | | | | | | V_TYPE |
| L0758 | Soares_testis_NHT | | | | | pT7T3D-Pac |
| | | | | | | (Pharmacia) with a |
| | | | | | | modified polylinker |
| L0759 | Soares_total_fetus_Nb2HF8_{—} | | | | | pT7T3D-Pac |
| | 9w | | | | | (Pharmacia) with a |
| | | | | | | modified polylinker |
| L0761 | NCI_CGAP_CLL1 | B-cell, chronic | | | | pT7T3D-Pac |
| | | lymphotic leukemia | | | | (Pharmacia) with a |
| | | | | | | modified polylinker |
| L0762 | NCI_CGAP_Br1.1 | breast | | | | pT7T3D-Pac |
| | | | | | | (Pharmacia) with a |
| | | | | | | modified polylinker |
| L0763 | NCI_CGAP_Br2 | breast | | | | pT7T3D-Pac |
| | | | | | | (Pharmacia) with a |
| | | | | | | modified polylinker |
| L0764 | NCI_CGAP_Co3 | colon | | | | pT7T3D-Pac |
| | | | | | | (Pharmacia) with a |
| | | | | | | modified polylinker |
| L0766 | NCI_CGAP_GCB1 | germinal center B | | | | pT7T3D-Pac |
| | | cell | | | | (Pharmacia) with a |
| | | | | | | modified polylinker |
| L0767 | NCI_CGAP_GC3 | pooled germ cell | | | | pT7T3D-Pac |
| | | tumors | | | | (Pharmacia) with a |
| | | | | | | modified polylinker |
| L0768 | NCI_CGAP_GC4 | pooled germ cell | | | | pT7T3D-Pac |
| | | tumors | | | | (Pharmacia) with a |
| | | | | | | modified polylinker |
| L0769 | NCI_CGAP_Brn25 | anaplastic | brain | | | pT7T3D-Pac |
| | | oligodendroglioma | | | | (Pharmacia) with a |
| | | | | | | modified polylinker |
| L0770 | NCI_CGAP_Brn23 | glioblastoma | brain | | | pT7T3D-Pac |
| | | (pooled) | | | | (Pharmacia) with a |
| | | | | | | modified polylinker |
| L0771 | NCI_CGAP_Co8 | adenocarcinoma | colon | | | pT7T3D-Pac |
| | | | | | | (Pharmacia) with a |
| | | | | | | modified polylinker |
| L0772 | NCI_CGAP_Co10 | colon tumor RER+ | colon | | | pT7T3D-Pac |
| | | | | | | (Pharmacia) with a |
| | | | | | | modified polylinker |
| L0773 | NCI_CGAP_Co9 | colon tumor RER+ | colon | | | pT7T3D-Pac |
| | | | | | | (Pharmacia) with a |
| | | | | | | modified polylinker |
| L0774 | NCI_CGAP_Kid3 | | kidney | | | pT7T3D-Pac |
| | | | | | | (Pharmacia) with a |
| | | | | | | modified polylinker |
| L0775 | NCI_CGAP_Kid5 | 2 pooled tumors | kidney | | | pT7T3D-Pac |
| | | (clear cell type) | | | | (Pharmacia) with a |
| | | | | | | modified polylinker |
| L0776 | NCI_CGAP_Lu5 | carcinoid | lung | | | pT7T3D-Pac |
| | | | | | | (Pharmacia) with a |
| | | | | | | modified polylinker |
| L0777 | Soares_NhHMPU_S1 | Pooled human | mixed (see | | | pT7T3D-Pac |
| | | melanocyte, fetal | below) | | | (Pharmacia) with a |
| | | heart, and pregnant | | | | modified polylinker |
| L0778 | Barstead pancreas HPLRB1 | | pancreas | | | pT7T3D-Pac |
| | | | | | | (Pharmacia) with a |
| | | | | | | modified polylinker |
| L0779 | Soares_NFL_T_GBC_S1 | | pooled | | | pT17T3D-Pac |
| | | | | | | (Pharmacia) with a |
| | | | | | | modified polylinker |
| L0780 | Soares_NSF_F8_9W_OT_PA_{—} | | pooled | | | pT7T3D-Pac |
| | P_S1 | | | | | (Pharmacia) with a |
| | | | | | | modified polylinker |
| L0782 | NCI_CGAP_Pr21 | normal prostate | prostate | | | pT7T3D-Pac |
| | | | | | | (Pharmacia) with a |
| | | | | | | modified polylinker |
| L0783 | NCI_CGAP_Pr22 | normal prostate | prostate | | | pT7T3D-Pac |
| | | | | | | (Pharmacia) with a |
| | | | | | | modified polylinker |
| L0784 | NCI_CGAP_Lei2 | leiomyosarcoma | soft tissue | | | pT7T3D-Pac |
| | | | | | | (Pharmacia) with a |
| | | | | | | modified polylinker |
| L0785 | Barstead spleen HPLRB2 | | spleen | | | pT7T3D-Pac |
| | | | | | | (Pharmacia) with a |
| | | | | | | modified polylinker |
| L0786 | Soares_NbHFB | | whole brain | | | pT7T3D-Pac |
| | | | | | | (Pharmacia) with a |
| | | | | | | modified polylinker |
| L0787 | NCI_CGAP_Sub1 | | | | | pT7T3D-Pac |
| | | | | | | (Pharmacia) with a |
| | | | | | | modified polylinker |
| L0788 | NCI_CGAP_Sub2 | | | | | pT7T3D-Pac |
| | | | | | | (Pharmacia) with a |
| | | | | | | modified polylinker |
| L0789 | NCI_CGAP_Sub3 | | | | | pT7T3D-Pac |
| | | | | | | (Pharmacia) with a |
| | | | | | | modified polylinker |
| L0790 | NCI_CGAP_Sub4 | | | | | pT7T3D-Pac |
| | | | | | | (Pharmacia) with a |
| | | | | | | modified polylinker |
| L0791 | NCI_CGAP_Sub5 | | | | | pT7T3D-Pac |
| | | | | | | (Pharmacia) with a |
| | | | | | | modified polylinker |
| L0792 | NCI_CGAP_Sub6 | | | | | pT7T3D-Pac |
| | | | | | | (Pharmacia) with a |
| | | | | | | modified polylinker |
| L0793 | NCI_CGAP_Sub7 | | | | | pT7T3D-Pac |
| | | | | | | (Pharmacia) with a |
| | | | | | | modified polylinker |
| L0794 | NCI_CGAP_GC6 | pooled germ cell | | | | pT7T3D-Pac |
| | | tumors | | | | (Pharmacia) with a |
| | | | | | | modified polylinker |
| L0796 | NCI_CGAP_Brn50 | medulloblastoma | brain | | | pT7T3D-Pac |
| | | | | | | (Pharmacia) with a |
| | | | | | | modified polylinker |
| L0800 | NCI_CGAP_Co16 | colon tumor, RER+ | colon | | | pT7T3D-Pac |
| | | | | | | (Pharmacia) with a |
| | | | | | | modified polylinker |
| L0803 | NCI_CGAP_Kid11 | | kidney | | | pT7T3D-Pac |
| | | | | | | (Pharmacia) with a |
| | | | | | | modified polylinker |
| L0804 | NCI_CGAP_Kid12 | 2 pooled tumors | kidney | | | pT7T3D-Pac |
| | | (clear cell type) | | | | (Pharmacia) with a |
| | | | | | | modified polylinker |
| L0805 | NCI_CGAP_Lu24 | carcinoid | lung | | | pT7T3D-Pac |
| | | | | | | (Pharmacia) with a |
| | | | | | | modified polylinker |
| L0806 | NCI_CGAP_Lu19 | squamous cell | lung | | | pT7T3D-Pac |
| | | carcinoma, poorly | | | | (Pharmacia) with a |
| | | differentiated (4 | | | | modified polylinker |
| L0807 | NCI_CGAP_Ov18 | fibrotheoma | ovary | | | pT7T3D-Pac |
| | | | | | | (Pharmacia) with a |
| | | | | | | modified polylinker |
| L0808 | Barstead prostate BPH | | prostate | | | pT7T3D-Pac |
| | HPLRB4 1 | | | | | (Pharmacia) with a |
| | | | | | | modified polylinker |
| L0809 | NCI_CGAP_Pr28 | | prostate | | | pT7T3D-Pac |
| | | | | | | (Pharmacia) with a |
| | | | | | | modified polylinker |
| L0946 | BT0333 | | breast | | | puc18 |
| L0988 | BT0387 | | breast | | | puc18 |
| L1057 | BT0559 | | breast | | | puc18 |
| L1441 | CT0249 | | colon | | | puc18 |
| L1562 | CN0027 | | colon_normal | | | puc18 |
| L1726 | HT0157 | | head_neck | | | puc18 |
| L1733 | HT0165 | | head_neck | | | puc18 |
| L1789 | HT0230 | | head_neck | | | puc18 |
| L1877 | HT0340 | | head_neck | | | puc18 |
| L2048 | ST0029 | | stomach | | | puc18 |
| L2093 | ST0124 | | stomach | | | puc18 |
| L2094 | ST0125 | | stomach | | | puc18 |
| L2116 | ST0163 | | stomach | | | puc18 |
| L2158 | ST0215 | | stomach | | | puc18 |
| L2174 | ST0240 | | stomach | | | puc18 |
| L2197 | ST0278 | | stomach | | | puc18 |
| L2200 | ST0281 | | stomach | | | puc18 |
| L2251 | Human fetal lung | Fetal lung | | | | |
| L2255 | GLC | corresponding non | | | | pBluescript sk(−) |
| | | cancerous liver | | | | |
| | | tissue | | | | |
| L2257 | NIH_MGC_65 | adenocarcinoma | colon | | | pCMV-SPORT6 |
| L2258 | NIH_MGC_67 | retinoblastoma | eye | | | pCMV-SPORT6 |
| L2259 | NIH_MGC_68 | large cell carcinoma | lung | | | pCMV-SPORT6 |
| L2260 | NIH_MGC_69 | large cell carcinoma, | lung | | | pCMV-SPORT6 |
| | | undifferentiated | | | | |
| L2261 | NIH_MGC_70 | epithelioid | pancreas | | | pCMV-SPORT6 |
| | | carcinoma | | | | |
| L2262 | NIH_MGC_72 | melanotic melanoma | skin | | | pCMV-SPORT6 |
| L2263 | NIH_MGC_66 | adenocarcinoma | ovary | | | pCMV-SPORT6 |
| L2264 | NIH_MGC_71 | leiomyosarcoma | uterus | | | pCMV-SPORT6 |
| L2265 | NIH_MGC_39 | adenocarcinoma | pancreas | | | pOTB7 |
| L2269 | NCI_CGAP_Thy11 | follicular carcinoma | thyroid | | | pAMP10 |
| L2282 | BT0703 | | breast | | | puc18 |
| L2289 | BT0757 | | breast | | | puc18 |
| L2300 | BT0789 | | breast | | | puc18 |
| L2308 | CT0383 | | colon | | | puc18 |
| L2319 | CT0402 | | colon | | | puc18 |
| L2359 | UT0023 | | uterus_tumor | | | puc18 |
| L2366 | UT0038 | | uterus_tumor | | | puc18 |
| L2392 | NN0091 | | nervous_normal | | | puc18 |
| L2442 | NN1025 | | nervous_normal | | | puc18 |
| L2453 | NN1071 | | nervous_normal | | | puc18 |
| L2476 | HT0084 | | head_neck | | | puc18 |
| L2477 | HT0408 | | head_neck | | | puc18 |
| L2480 | HT0448 | | head_neck | | | puc18 |
| L2490 | HT0545 | | head_neck | | | puc18 |
| L2491 | HT0559 | | head_neck | | | puc18 |
| L2494 | HT0577 | | head_neck | | | puc18 |
| L2497 | HT0618 | | head_neck | | | puc18 |
| L2498 | HT0619 | | head_neck | | | puc18 |
| L2504 | HT0636 | | head_neck | | | puc18 |
| L2513 | HT0678 | | head_neck | | | puc18 |
| L2519 | HT0698 | | head_neck | | | puc18 |
| L2541 | HT0730 | | head_neck | | | puc18 |
| L2543 | HT0734 | | head_neck | | | puc18 |
| L2562 | HT0760 | | head_neck | | | puc18 |
| L2570 | HT0771 | | head_neck | | | puc18 |
| L2578 | HT0785 | | head_neck | | | puc18 |
| L2610 | HT0837 | | head_neck | | | puc18 |
| L2614 | HT0841 | | head_neck | | | puc18 |
| L2627 | HT0861 | | head_neck | | | puc18 |
| L2630 | HT0865 | | head_neck | | | puc18 |
| L2636 | HT0876 | | head_neck | | | puc18 |
| L2637 | HT0877 | | head_neck | | | puc18 |
| L2638 | HT0878 | | head_neck | | | puc18 |
| L2640 | HT0881 | | head_neck | | | puc18 |
| L2641 | HT0882 | | head_neck | | | puc18 |
| L2643 | HT0885 | | head_neck | | | puc18 |
| L2644 | HT0886 | | head_neck | | | puc18 |
| L2647 | HT0894 | | head_neck | | | puc18 |
| L2650 | HT0934 | | head_neck | | | puc18 |
| L2651 | NIH_MGC_20 | melanotic melanoma | skin | | | pOTB7 |
| L2652 | NIH_MGC_57 | glioblastoma | brain | | | pDNR-LIB |
| | | | | | | (Clontech) |
| L2653 | NIH_MGC_58 | hypernephroma | kidney | | | pDNR-LIB |
| | | | | | | (Clontech) |
| L2654 | NIH_MGC_9 | adenocarcinoma cell | ovary | | | pOTB7 |
| | | line | | | | |
| L2655 | NIH_MGC_55 | from acute | bone marrow | | | pDNR-LIB |
| | | myelogenous | | | | (Clontech) |
| | | leukemia | | | | |
| L2657 | NIH_MGC_54 | from chronic | bone marrow | | | pDNR-LIB |
| | | myelogenous | | | | (Clontech) |
| | | leukemia | | | | |
| L2669 | NT0022 | | nervous_tumor | | | puc18 |
| L2694 | NT0080 | | nervous_tumor | | | puc18 |
| L2695 | NT0081 | | nervous_tumor | | | puc18 |
| L2708 | NT0104 | | nervous_tumor | | | puc18 |
| L2730 | GN0021 | | placenta_normal | | | puc18 |
| L2744 | FT0004 | | prostate_tumor | | | puc18 |
| L2754 | FT0022 | | prostate_tumor | | | puc18 |
| L2756 | FT0024 | | prostate_tumor | | | puc18 |
| L2771 | FT0050 | | prostate_tumor | | | puc18 |
| L2788 | FT0071 | | prostate_tumor | | | puc18 |
| L2789 | FT0073 | | prostate_tumor | | | puc18 |
| L2799 | FT0096 | | prostate_tumor | | | puc18 |
| L2817 | FT0131 | | prostate_tumor | | | puc18 |
| L2819 | FT0134 | | prostate_tumor | | | puc18 |
| L2844 | UM0018 | | uterus | | | puc18 |
| L2847 | UM0023 | | uterus | | | puc18 |
| L2853 | UM0081 | | uterus | | | puc18 |
| L2854 | UM0091 | | uterus | | | puc18 |
| L2870 | AN0013 | | amnion_normal | | | puc18 |
| L2880 | AN0033 | | amnion_normal | | | puc18 |
| L2884 | AN0041 | | amnion_normal | | | puc18 |
| L2888 | AN0056 | | amnion_normal | | | puc18 |
| L2893 | AN0062 | | amnion_normal | | | puc18 |
| L2906 | BN0047 | | breast_normal | | | puc18 |
| L2910 | BN0070 | | breast_normal | | | puc18 |
| L2914 | BN0090 | | breast_normal | | | puc18 |
| L2919 | BN0115 | | breast_normal | | | puc18 |
| L2995 | BN0269 | | breast_normal | | | puc18 |
| L3041 | BN0332 | | breast_normal | | | puc18 |
| L3044 | BN0335 | | breast_normal | | | puc18 |
| L3078 | EN0042 | | lung_normal | | | puc18 |
| L3082 | ET0008 | | lung_tumor | | | puc18 |
| L3104 | ET0041 | | lung_tumor | | | puc18 |
| L3118 | ET0070 | | lung_tumor | | | puc18 |
| L3135 | MT0025 | | marrow | | | puc18 |
| L3162 | MT0061 | | marrow | | | puc18 |
| L3181 | MT0107 | | marrow | | | puc18 |
| L3182 | MT0108 | | marrow | | | puc18 |
| L3204 | OT0034 | | ovary | | | puc18 |
| L3207 | OT0063 | | ovary | | | puc18 |
| L3209 | OT0065 | | ovary | | | puc18 |
| L3210 | OT0067 | | ovary | | | puc18 |
| L3212 | OT0076 | | ovary | | | puc18 |
| L3215 | OT0083 | | ovary | | | puc18 |
| L3255 | FN0064 | | prostate_normal | | | puc18 |
| L3281 | FN0107 | | prostate_normal | | | puc18 |
| L3295 | FN0138 | | prostate_normal | | | puc18 |
| L3313 | FN0182 | | prostate_normal | | | puc18 |
| L3323 | SN0016 | | stomach_normal | | | puc18 |
| L3352 | TN0027 | | testis_normal | | | puc18 |
| L3355 | TN0032 | | testis_normal | | | puc18 |
| L3359 | TN0036 | | testis_normal | | | puc18 |
| L3374 | TN0070 | | testis_normal | | | puc18 |
| L3376 | TN0078 | | testis_normal | | | puc18 |
| L3377 | TN0079 | | testis_normal | | | puc18 |
| L3387 | GKB | hepatocellular | | | | pBluescript sk(−) |
| | | carcinoma | | | | |
| L3388 | GKC | hepatocellular | | | | pBluescript sk(−) |
| | | carcinoma | | | | |
| L3389 | GKD | hepatocellular | | | | pBluescript sk(−) |
| | | carcinoma | | | | |
| L3391 | NIH_MGC_53 | carcinoma, cell line | bladder | | | pDNR-LIB |
| | | | | | | (Clontech) |
| L3401 | AN0085 | | amnion_normal | | | puc18 |
| L3421 | BT0634 | | breast | | | puc18 |
| L3439 | CT0478 | | colon | | | puc18 |
| L3450 | CT0508 | | colon | | | puc18 |
| L3467 | GN0024 | | placenta_normal | | | puc18 |
| L3485 | GN0070 | | placenta_normal | | | puc18 |
| L3491 | GN0076 | | placenta_normal | | | puc18 |
| L3495 | HT0570 | | head_neck | | | puc18 |
| L3496 | HT0572 | | head_neck | | | puc18 |
| L3501 | HT0817 | | head_neck | | | puc18 |
| L3503 | HT0870 | | head_neck | | | puc18 |
| L3506 | HT0879 | | head_neck | | | puc18 |
| L3508 | HT0888 | | head_neck | | | puc18 |
| L3509 | HT0890 | | head_neck | | | puc18 |
| L3511 | HT0900 | | head_neck | | | puc18 |
| L3513 | HT0907 | | head_neck | | | puc18 |
| L3518 | HT0915 | | head_neck | | | puc18 |
| L3526 | HT0931 | | head_neck | | | puc18 |
| L3547 | NN0045 | | nervous_normal | | | puc18 |
| L3580 | TN0098 | | testis_normal | | | puc18 |
| L3603 | UM0093 | | uterus | | | puc18 |
| L3610 | UT0009 | | uterus_tumor | | | puc18 |
| L3612 | UT0011 | | uterus_tumor | | | puc18 |
| L3618 | UT0050 | | uterus_tumor | | | puc18 |
| L3620 | UT0058 | | uterus_tumor | | | puc18 |
| L3626 | UT0064 | | uterus_tumor | | | puc18 |
| L3630 | UT0071 | | uterus_tumor | | | puc18 |
| L3633 | UT0082 | | uterus_tumor | | | puc18 |
| L3634 | NIH_MGC_56 | primitive | brain | | | pDNR-LIB |
| | | neuroectoderm | | | | (Clontech) |
| L3635 | NIH_MGC_62 | melanotic | skin | | | pDNR-LIB |
| | | melanoma, high | | | | (Clontech) |
| | | MDR | | | | |
| L3638 | NIH_MGC_78 | | pancreas | | | pDNR-LIB |
| | | | | | | (Clontech) |
| L3639 | NIH_MGC_81 | | muscle | | | pDNR-LIB |
| | | | (skeletal) | | | (Clontech) |
| L3640 | NIH_MGC_82 | | testis | | | pDNR-LIB |
| | | | | | | (Clontech) |
| L3641 | NIH_MGC_83 | | prostate | | | pDNR-LIB |
| | | | | | | (Clontech) |
| L3643 | ADB | Adrenal gland | | | | pBluescript sk(−) |
| L3644 | ADC | Adrenal gland | | | | pBluescript sk(−) |
| L3645 | Cu | adrenal cortico | | | | pBluescript sk(−) |
| | | adenoma for | | | | |
| | | Cushing's syndrome | | | | |
| L3646 | DCA | | | | | pTriplEx2 |
| L3649 | DCB | | | | | pTriplEx2 |
| L3653 | HTB | Hypothalamus | | | | pBluescript sk(−) |
| L3655 | HTC | Hypothalamus | | | | pBluescript sk(−) |
| L3659 | CB | cord blood | | | | pBluescript |
| L3661 | NPA | pituitary | | | | pBluescript sk(−) |
| L3663 | NIH_MGC_60 | adenocarcinoma | prostate | | | pDNR-LIB |
| | | | | | | (Clontech) |
| L3666 | NIH_MGC_77 | | lung | | | pDNR-LIB |
| | | | | | | (Clontech) |
| L3667 | NIH_MGC_79 | | placenta | | | pDNR-LIB |
| | | | | | | (Clontech) |
| L3673 | AN0084 | | amnion_normal | | | puc18 |
| L3684 | BT0812 | | breast | | | puc18 |
| L3705 | CT0486 | | colon | | | puc18 |
| L3708 | CT0514 | | colon | | | puc18 |
| L3739 | HT0540 | | head_neck | | | puc18 |
| L3743 | HT0909 | | head_neck | | | puc18 |
| L3744 | HT0916 | | head_neck | | | puc18 |
| L3750 | HT0945 | | head_neck | | | puc18 |
| L3751 | HT0946 | | head_neck | | | puc18 |
| L3752 | HT0947 | | head_neck | | | puc18 |
| L3778 | TN0112 | | testis_normal | | | puc18 |
| L3797 | UT0043 | | uterus_tumor | | | puc18 |
| L3803 | UT0053 | | uterus_tumor | | | puc18 |
| L3804 | UT0073 | | uterus_tumor | | | puc18 |
| L3809 | UT0087 | | uterus_tumor | | | puc18 |
| L3811 | NPC | pituitary | | | | pBluescript sk(−) |
| L3814 | BM | Bone marrow | | | | pTriplEx2 |
| L3815 | MDS | Bone marrow | | | | pTriplEx2 |
| L3816 | HEMBA1 | whole embryo, | | | | pME18SFL3 |
| | | mainly head | | | | |
| L3817 | HEMBB1 | whole embryo, | | | | pME18SFL3 |
| | | mainly body | | | | |
| L3818 | MAMMA1 | mammary gland | | | | pME18SFL3 |
| L3819 | NIH_MGC_76 | | liver | | | pDNR-LIB |
| | | | | | | (Clontech) |
| L3820 | NIH_MGC_46 | leiomyosarcoma cell | uterus | | | pOTB7 |
| | | line | | | | |
| L3821 | NIH_MGC_48 | primary B-cells from | B-cells | | | pOTB7 |
| | | tonsils (cell line) | | | | |
| L3824 | NT2RM2 | | | NT2 | | pME18SFL3 |
| L3825 | NT2RM4 | | | NT2 | | pME18SFL3 |
| L3826 | NT2RP1 | | | NT2 | | pUC19FL3 |
| L3827 | NT2RP2 | | | NT2 | | pME18SFL3 |
| L3828 | NT2RP3 | | | NT2 | | pME18SFL3 |
| L3829 | NT2RP4 | | | NT2 | | pME18SFL3 |
| L3831 | OVARC1 | ovary, tumor tissue | | | | pME18SFL3 |
| L3832 | PLACE1 | placenta | | | | pME18SFL3 |
| L3834 | PLACE3 | placenta | | | | pME18SFL3 |
| L3835 | PLACE4 | placenta | | | | pME18SFL3 |
| L3837 | THYRO1 | thyroid gland | | | | pME18SFL3 |
| L3839 | Y79AA1 | | | Y79 | | pME18SFL3 |
| L3841 | NIH_MGC_18 | large cell carcinoma | lung | | | pOTB7 |
| L3848 | BN0408 | | breast_normal | | | puc18 |
| L3861 | BT0850 | | breast | | | puc18 |
| L3863 | HT0538 | | head_neck | | | puc18 |
| L3871 | NIH_MGC_19 | neuroblastoma | brain | | | pOTB7 |
| L3872 | NCI_CGAP_Skn1 | | skin, normal, 4 | | | pCMV-SPORT6 |
| | | | pooled sa | | | |
| L3888 | CS0018 | | colon_est | | | puc18 |
| L3904 | NCI_CGAP_Brn64 | glioblastoma with | brain | | | pCMV-SPORT6 |
| | | EGFR amplification | | | | |
| L3905 | NCI_CGAP_Brn67 | anaplastic | brain | | | pCMV-SPORT6 |
| | | oligodendroglioma | | | | |
| | | with 1p/19q loss | | | | |
| L4067 | BT0724 | | breast | | | puc18 |
| L4142 | HT0016 | | head_neck | | | puc18 |
| L4347 | NN1073 | | nervous_normal | | | puc18 |
| L4350 | NN1145 | | nervous_normal | | | puc18 |
| L4353 | NN1148 | | nervous_normal | | | puc18 |
| L4424 | UM0003 | | uterus | | | puc18 |
| L4435 | UM0025 | | uterus | | | puc18 |
| L4441 | UM0038 | | uterus | | | puc18 |
| L4496 | Lupski_sciatic_nerve | sciatic nerve | | | | pCMV-SPORT6 |
| | | | | | | (Life Technologies) |
| L4498 | Lupski_sympathetic_trunk | sympathetic trunk | | | | pCMV-SPORT6 |
| | | | | | | (Life Technologies) |
| L4501 | NCI_CGAP_Sub8 | | | | | pT7T3D-Pac |
| | | | | | | (Pharmacia) with a |
| | | | | | | modified polylinker |
| L4508 | NCI_CGAP_Thy8 | normal epithelium | thyroid | | | pAMP10 |
| L4557 | NCI_CGAP_Adr1 | neuroblastoma | adrenal gland | | | pCMV-SPORT6 |
| L4558 | NCI_CGAP_Pan3 | | pancreas | | | pCMV-SPORT6 |
| L4559 | NCI_CGAP_Thy3 | follicular carcinoma | thyroid | | | pCMV-SPORT6 |
| L4669 | NCI_CGAP_Ov41 | serous papillary | ovary | | | pCMV-SPORT6 |
| | | tumor | | | | |
| L4747 | NCI_CGAP_Brn41 | oligodendroglioma | brain | | | pT7T3D-Pac |
| | | | | | | (Pharmacia) with a |
| | | | | | | modified polylinker |
| L4772 | NIH_MGC_42 | epithelioid | pancreas | | | pOTB7 |
| | | carcinoma cell line | | | | |
| L4773 | NIH_MGC_45 | renal carcinoma | kidney | | | pOTB7 |
| | | (ascites) | | | | |
| L4778 | NIH_MGC_43 | normal pigmented | eye | | | pOTB7 |
| | | retinal epithelium | | | | |
| L4779 | NIH_MGC_49 | melanotic | skin | | | pOTB7 |
| | | melanoma, high | | | | |
| | | MDR (cell line) | | | | |
| L4784 | microdissected normal | epidermis | skin | | | pAMP1 |
| | human epidermis | | | | | |
| L4788 | Human Iris cDNA (Un- | Iris | Eye | | | pCMVSPORT6 |
| | normalized, unamplified) | | | | | |
| L4795 | AN0080 | | amnion_normal | | | puc18 |
| L4799 | KT0015 | | bladder_tumor | | | puc18 |
| L4801 | KT0002 | | bladder_tumor | | | puc18 |
| L4811 | KT0040 | | bladder_tumor | | | puc18 |
| L4813 | KT0042 | | bladder_tumor | | | puc18 |
| L4815 | KT0041 | | bladder_tumor | | | puc18 |
| L4817 | KT0035 | | bladder_tumor | | | puc18 |
| L4824 | KT0030 | | bladder_tumor | | | puc18 |
| L4845 | HB0037 | | bocio_tumor | | | puc18 |
| L4852 | BT0845 | | breast | | | puc18 |
| L4860 | BT0826 | | breast | | | puc18 |
| L4868 | BT0858 | | breast | | | puc18 |
| L4884 | BN0414 | | breast_normal | | | puc18 |
| L4888 | BN0416 | | breast_normal | | | puc18 |
| L4890 | BN0424 | | breast_normal | | | puc18 |
| L4900 | BN0428 | | breast_normal | | | puc18 |
| L4925 | EN0063 | | lung_normal | | | puc18 |
| L4940 | EN0083 | | lung_normal | | | puc18 |
| L4948 | EN0086 | | lung_normal | | | puc18 |
| L4949 | EN0102 | | lung_normal | | | puc18 |
| L4970 | EN0093 | | lung_normal | | | puc18 |
| L4986 | FN0194 | | prostate_normal | | | puc18 |
| L4995 | FT0194 | | prostate_tumor | | | puc18 |
| L5010 | ET0149 | | lung_tumor | | | puc18 |
| L5012 | ET0119 | | lung_tumor | | | puc18 |
| L5031 | ET0095 | | lung_tumor | | | puc18 |
| L5032 | ET0097 | | lung_tumor | | | puc18 |
| L5038 | ET0105 | | lung_tumor | | | puc18 |
| L5042 | ET0104 | | lung_tumor | | | puc18 |
| L5049 | ET0101 | | lung_tumor | | | puc18 |
| L5050 | ET0136 | | lung_tumor | | | puc18 |
| L5054 | ET0106 | | lung_tumor | | | puc18 |
| L5067 | ET0171 | | lung_tumor | | | puc18 |
| L5070 | ET0188 | | lung_tumor | | | puc18 |
| L5080 | ET0183 | | lung_tumor | | | puc18 |
| L5105 | TN0182 | | testis_normal | | | puc18 |
| L5123 | MT0146 | | marrow | | | puc18 |
| L5125 | MT0152 | | marrow | | | puc18 |
| L5145 | MT0147 | | marrow | | | puc18 |
| L5152 | MT0160 | | marrow | | | puc18 |
| L5156 | MT0179 | | marrow | | | puc18 |
| L5169 | MT0228 | | marrow | | | puc18 |
| L5170 | MT0226 | | marrow | | | puc18 |
| L5222 | UT0097 | | uterus_tumor | | | puc18 |
| L5229 | UT0114 | | uterus_tumor | | | puc18 |
| L5236 | UT0115 | | uterus_tumor | | | puc18 |
| L5238 | UT0112 | | uterus_tumor | | | puc18 |
| L5241 | NIH_MGC_86 | osteosarcoma, cell | bone | | | pCMV-SPORT6 |
| | | line | | | | |
| L5242 | NIH_MGC_95 | hippocampus, cell | brain | | | pBluescriptR |
| | | line | | | | (modified |
| | | | | | | pBluescript KS+) |
| L5243 | NIH_MGC_96 | hypothalamus, cell | brain | | | pBluescriptR |
| | | line | | | | (modified |
| | | | | | | pBluescript KS+) |
| L5244 | NIH_MGC_84 | adrenal cortex | adrenal gland | | | pCMV-SPORT6 |
| | | carcinoma, cell line | | | | |
| L5255 | NT0203 | | nervous_tumor | | | puc18 |
| L5273 | NT0273 | | nervous_tumor | | | puc18 |
| L5286 | NCI_CGAP_Thy10 | medullary carcinoma | thyroid | | | pAMP10 |
| L5300 | NN1156 | | nervous_normal | | | puc18 |
| L5306 | NN0219 | | nervous_normal | | | puc18 |
| L5312 | NN1200 | | nervous_normal | | | puc18 |
| L5370 | NN0244 | | nervous_normal | | | puc18 |
| L5389 | NIH_MGC_88 | duodenal | small intestine | | | pCMV-SPORT6 |
| | | adenocarcinoma, cell | | | | |
| | | line | | | | |
| L5401 | GN0141 | | placenta_normal | | | puc18 |
| L5403 | GN0150 | | placenta_normal | | | puc18 |
| L5404 | GN0103 | | placenta_normal | | | puc18 |
| L5438 | GN0216 | | placenta_normal | | | puc18 |
| L5442 | GN0165 | | placenta_normal | | | puc18 |
| L5448 | GN0157 | | placenta_normal | | | puc18 |
| L5460 | NIH_MGC_85 | lymphoma, cell line | lymph | | | pCMV-SPORT6 |
| L5461 | NIH_MGC_87 | mammary | breast | | | pCMV-SPORT6 |
| | | adenocarcinoma, cell | | | | |
| | | line | | | | |
| L5462 | NIH_MGC_90 | adenocarcinoma, cell | liver | | | pCMV-SPORT6 |
| | | line | | | | |
| L5565 | NCI_CGAP_Brn66 | glioblastoma with | brain | | | pCMV-SPORT6 |
| | | probably TP53 | | | | |
| | | mutation | | | | |
| L5569 | NCI_CGAP_HN17 | normal epithelium | nasopharynx | | | pAMP10 |
| L5575 | NCI_CGAP_Brn65 | glioblastoma without | brain | | | pCMV-SPORT6 |
| | | EGFR amplification | | | | |
| L5622 | NCI_CGAP_Skn3 | | skin | | | pCMV-SPORT6 |
| L5623 | NCI_CGAP_Skn4 | squamous cell | skin | | | pCMV-SPORT6 |
| | | carcinoma | | | | |
| L6411 | NCI_CGAP_Sub9 | mixed | | | | pT7T3-Pac |
| | | | | | | (Pharmacia) with a |
| | | | | | | modified polylinker |
| L6412 | NCI_CGAP_DF0 | Subchondral Bone | Bone | | | pT7T3-Pac |
| | | | | | | (Pharmacia) with a |
| | | | | | | modified polylinker |
| L6413 | NCI_CGAP_DH0 | Metastatic | Lung | | | pT7T3-Pac |
| | | Chondrosarcoma | | | | (Pharmacia) with a |
| | | | | | | modified polylinker |
| L6414 | NCI_CGAP_DI0 | Lung Focal Fibrosis | Lung | | | pT7T3-Pac |
| | | | | | | (Pharmacia) with a |
| | | | | | | modified polylinker |
| L6415 | NCI_CGAP_Fs1 | Fibrosarcoma | | | | pT7T3-Pac |
| | | | | | | (Pharmacia) with a |
| | | | | | | modified polylinker |
| L6416 | NCI_CGAP_DF1 | Subchondral Bone | Bone | | | pT7T3-Pac |
| | | | | | | (Pharmacia) with a |
| | | | | | | modified polylinker |
| L6417 | NCI_CGAP_DT0 | Metastatic | Lung | | | pT7T3-Pac |
| | | Chondrosarcoma | | | | (Pharmacia) with a |
| | | | | | | modified polylinker |
| L6418 | NCI_CGAP_DT1 | Metastatic | Lung | | | pT7T3-Pac |
| | | Chondrosarcoma | | | | (Pharmacia) with a |
| | | | | | | modified polylinker |
| L6419 | NCI_CGAP_ED0 | Chondrosarcoma | Left Pubic | | | pT7T3-Pac |
| | | | Bone | | | (Pharmacia) with a |
| | | | | | | modified polylinker |
| L6420 | NCI_CGAP_DH1 | Metastatic | Lung | | | pT7T3-Pac |
| | | Chondrosarcoma | | | | (Pharmacia) with a |
| | | | | | | modified polylinker |
| L6421 | NCI_CGAP_EI1 | Chondrosarcoma | Left Pelvis | | | pT7T3-Pac |
| | | | | | | (Pharmacia) with a |
| | | | | | | modified polylinker |
| L6423 | NCI_CGAP_EI0 | Chondrosarcoma | Left Pelvis | | | pT7T3-Pac |
| | | | | | | (Pharmacia) with a |
| | | | | | | modified polylinker |
| L6424 | NCI_CGAP_Pl2 | Placenta | Placenta | | | pT7T3-Pac |
| | | | | | | (Pharmacia) with a |
| | | | | | | modified polylinker |
| L6425 | NCI_CGAP_ED1 | Chondrosarcoma | Left Pubic | | | pT7T3-Pac |
| | | | Bone | | | (Pharmacia) with a |
| | | | | | | modified polylinker |
| L6426 | NCI_CGAP_Pl3 | Placenta | Placenta | | | pT7T3-Pac |
| | | | | | | (Pharmacia) with a |
| | | | | | | modified polylinker |
| L6427 | NCI_CGAP_Pl6 | Placenta | Placenta | | | pT7T3-Pac |
| | | | | | | (Pharmacia) with a |
| | | | | | | modified polylinker |
| L6432 | NCI_CGAP_Car1 | Osteoarthritic | Knee | | | pT7T3-Pac |
| | | Cartilage | | | | (Pharmacia) with a |
| | | | | | | modified polylinker |
| L7065 | NCI_CGAP_Ct1 | Osteoarthritic | Knee | | | pT7T3-Pac |
| | | Cartilage | | | | (Pharmacia) with a |
| | | | | | | modified polylinker |
| L7068 | NCI_CGAP_Ch1 | Chondrosarcoma | Left Pelvis | | | pT7T3-Pac |
| | | Grade II | | | | (Pharmacia) with a |
| | | | | | | modified polylinker |
| L7069 | NCI_CGAP_Ch2 | Chondrosarcoma | Left Pelvis | | | pT7T3-Pac |
| | | Grade II | | | | (Pharmacia) with a |
| | | | | | | modified polylinker |

Description of Table 5

[0278] Table 5 provides a key to the OMIM reference identification numbers disclosed in Table 1B, column 10. OMIM reference identification numbers (Table 5, Column 1) were derived from Online Mendelian Inheritance in Man (Online Mendelian Inheritance in Man, OMIM. McKusick-Nathans Institute for Genetic Medicine, Johns Hopkins University (Baltimore, Md.) and National Center for Biotechnology Information, National Library of Medicine, (Bethesda, Md.) (2000). World Wide Web URL: http://www.ncbi.nlm.nih.gov/omim/). Column 2 provides diseases associated with the cytologic band disclosed in Table 1B, column 9, as determined using the Morbid Map database.

TABLE 5

| OMIM | |
|---|---|
| Reference | Description |
| 100678 | ACAT2 deficiency |
| 102300 | Restless legs syndrome |
| 102480 | Male infertility due to acrosin deficiency |
| 102600 | Urolithiasis, 2,8-dihydroxyadenine |
| 102680 | Hypertension, essential, salt-sensitive, 145500 |
| 103050 | Autism, succinylpurinemic |
| 103050 | Adenylosuccinase deficiency |
| 103600 | Analbuminemia |
| 103600 | [Dysalbuminemic hyperthyroxinemia] |
| 103600 | [Dysalbuminemic hyperzincemia], 194470 |
| 103950 | Alzheimer disease, susceptibility to |
| 103950 | Emphysema due to alpha-2-macroglobulin deficiency |
| 104150 | [AFP deficiency, congenital] |
| 104150 | [Hereditary persistence of alpha-fetoprotein] |
| 104500 | Amelogenesis imperfecta-2, hypoplastic local type |
| 107300 | Antithrombin III deficiency |
| 108600 | Spastic ataxia, autosomal dominant |
| 108725 | Atherosclerosis, susceptibility to |
| 108730 | Brody myopathy, 601003 |
| 108962 | Hypertension, salt-resistant |
| 109270 | Hemolytic anemia due to band 3 defect |
| 109270 | Renal tubular acidosis, distal, 179800 |
| 109270 | Spherocytosis, hereditary |
| 109270 | [Acanthocytosis, one form] |
| 109270 | [Diego blood group], 110500 |
| 109270 | [Elliptocytosis, Malaysian-Melanesian type] |
| 109480 | [Blood group OK], 111380 |
| 109535 | Immunodeficiency with hyper-IgM, type 3, 606843 |
| 109690 | Asthma, nocturnal, susceptibility to |
| 109690 | Obesity, susceptibility to |
| 110600 | [Dombrock blood group] |
| 114208 | Hypokalemic periodic paralysis, 170400 |
| 114208 | Malignant hyperthermia susceptibility 5, 601887 |
| 114290 | Acampomelic campolelic dysplasia |
| 114290 | Campomelic dysplasia |
| 114290 | Campomelic dysplasia with autosomal sex reversal |
| 115660 | Cataract, cerulean, type 1 |
| 117800 | [Earwax, wet/dry] |
| 118485 | Lipoid congenital adrenal hyperplasia, 201710 |
| 118485 | Polycystic ovary syndrome, 184700 |
| 120150 | Osteogenesis imperfecta, type I, 166200 |
| 120150 | Osteogenesis imperfecta, type II, 166210 |
| 120150 | Osteogenesis imperfecta, type III, 259420 |
| 120150 | Osteogenesis imperfecta, type IV, 166220 |
| 120150 | Osteoporosis, idiopathic, 166710 |
| 120150 | Dissection of cervical arteries |
| 120150 | Ehlers-Danlos syndrome, type I, 130000 |
| 120150 | Ehlers-Danlos syndrome, type VII, 130060 |
| 120160 | Marfan syndrome, atypical |
| 120160 | Osteogenesis imperfecta, 3 clinical forms, |
| | 166200, 166210, 259420 |
| 120160 | Osteoporosis, idiopathic, 166710 |
| 120160 | Ehlers-Danlos syndrome, type VIIA2, 130060 |
| 120502 | Branchiootic syndrome 2 |
| 120580 | C1r/C1s deficiency, combined |
| 120580 | C1s deficiency, isolated |
| 120620 | [Knops blood group system], 607486 |
| 120620 | SLE susceptibility |
| 120620 | CR1 deficiency |
| 120700 | C3 deficiency |
| 120920 | Measles, susceptibility to |
| 121050 | Contractural arachnodactyly, congenital |
| 124030 | Parkinsonism, susceptibility to |
| 124030 | Debrisoquine sensitivity |
| 125647 | Keratosis palmoplantaris striata II |
| 125647 | Arrhythmogenic right ventricular dysplasia 8, |
| | 607450 |
| 125647 | Skin fragility-woolly hair syndrome, 607655 |
| 125647 | Dilated cardiomyopathy with woolly hair and |
| | keratoderma, 605676 |
| 125852 | Diabetes mellitus, insulin-dependent, 2 |
| 126337 | Myxoid liposarcoma |
| 126452 | Autonomic nervous system dysfunction |
| 126452 | [Novelty seeking personality], 601696 |
| 126650 | Chloride diarrhea, congenital, Finnish type, |
| | 214700 |
| 126650 | Colon cancer |
| 128200 | Paroxysmal kinesigenic choreoathetosis |
| 130130 | Hematopoiesis, cyclic, 162800 |
| 130130 | Neutropenia, congenital, 202700 |
| 131210 | Atherosclerosis, susceptibility to |
| 131400 | Eosinophilia, familial |
| 131440 | Eosinophilic myeloproliferative disorder |
| 133171 | [Erythrocytosis, familial], 133100 |
| 134370 | Factor H deficiency |
| 134370 | Hemolytic-uremic syndrome, 235400 |
| 134370 | Membroproliferative glomerulonephritis |
| 134370 | Nephropathy, chronic hypocomplementemic |
| 134570 | Factor XIIIA deficiency |
| 134580 | Factor XIIIB deficiency |
| 134934 | Hypochondroplasia, 146000 |
| 134934 | Muencke syndrome, 602849 |
| 134934 | Thanatophoric dysplasia, types I and II, 187600 |
| 134934 | Bladder cancer, 109800 |
| 134934 | Achondroplasia, 100800 |
| 134934 | Cervical cancer, somatic, 603956 |
| 134934 | Colorectal cancer, somatic, 109800 |
| 134934 | Crouzon syndrome with acanthosis nigricans |
| 136132 | [Fish-odor syndrome], 602079 |
| 136836 | Fucosyltransferase-6 deficiency |
| 137164 | Myoclonic epilepsy, severe, of infancy, 607208 |
| 137164 | Epilepsy, childhood absence, 607681 |
| 137164 | Epilepsy, generalized, with febrile seizures plus, |
| | 604233 |
| 138033 | Diabetes mellitus, noninsulin-dependent, 125853 |
| 138040 | Cortisol resistance |
| 138190 | Diabetes mellitus, noninsulin-dependent |
| 138491 | Hyperekplexia and spastic paraparesis |
| 138491 | Startle disease, autosomal recessive |
| 138491 | Startle disease/hyperekplexia, autosomal dominant, |
| | 149400 |
| 138981 | Pulmonary alveolar proteinosis, 265120 |
| 139130 | Hypertension, essential, susceptibility to, 145500 |
| 139200 | Graves disease, susceptibility to, 3, 275000 |
| 139250 | Isolated growth hormone deficiency, Illig type with |
| | absent GH and Kowarski type with bioinactive GH |
| 141900 | HPFH, deletion type |
| 141900 | Heinz body anemias, beta- |
| 141900 | Methemoglobinemias, beta- |
| 141900 | Sickle cell anemia |
| 141900 | Thalassemias, beta- |
| 141900 | Erythremias, beta- |
| 142000 | Thalassemia due to Hb Lepore |
| 142000 | Thalassemia, delta- |
| 142200 | HPFH, nondeletion type A |
| 142250 | HPFH, nondeletion type G |
| 143100 | Huntington disease |
| 145260 | Pseudohypoaldosteronism, type II |
| 145981 | Hypocalciuric hypercalcemia, type II |
| 146738 | Cryptorchidism, idiopathic, 219050 |
| 147060 | Hyper-IgE syndrome |
| 147061 | Allergy and asthma susceptibility |
| 147141 | Leukemia, acute lymphoblastic |
| 147440 | Growth retardation with deafness and mental |
| | retardation |
| 147575 | Gastric cancer, 137215 |
| 147575 | Macrocytic anemia, refractory, of 5q- syndrome, |
| | 153550 |
| 147575 | Myelodysplastic syndrome, preleukemic |
| 147575 | Myelogenous leukemia, acute |
| 147575 | Nonsmall cell lung cancer |
| 147670 | Leprechaunism, 246200 |
| 147670 | Rabson-Mendenhall syndrome, 262190 |
| 147670 | Diabetes mellitus, insulin-resistant, with |
| | acanthosis nigricans |
| 147683 | Asthma, susceptibility to, 600807 |
| 147781 | Atopy, susceptibility to |
| 147840 | Malaria, cerebral, susceptibility to |
| 148065 | White sponge nevus, 193900 |
| 148080 | Ichthyosis, cyclic, with epidermolytic hyperkeratosis, |
| | 607602 |
| 148080 | Nevus, epidermal, epidermolytic hyperkeratotic type, |
| | 600648 |
| 148080 | Epidermolytic hyperkeratosis, 113800 |
| 148500 | Tylosis with esophageal cancer |
| 150200 | [Placental lactogen deficiency] |
| 150292 | Epidermolysis bullosa, Herlitz junctional type, 226700 |
| 150292 | Epidermolysis bullosa, generalized atrophic benign, |
| | 226650 |
| 150310 | Epidermolysis bullosa, Herlitz junctional type, 226700 |
| 150310 | Epidermolysis bullosa, generalized atrophic benign, |
| | 226650 |
| 151440 | Leukemia, T-cell acute lymphoblastoid |
| 151460 | Severe combined immunodeficiency due to PTPRC |
| | deficiency |
| 151460 | Multiple sclerosis, susceptibility to, 126200 |
| 151670 | Hepatic lipase deficiency |
| 153455 | Cutis laxa, recessive, type I, 219100 |
| 154275 | Malignant hyperthermia susceptibility 2 |
| 154400 | Acrofacial dysostosis, Nager type |
| 154870 | Keutel syndrome, 245150 |
| 155555 | [Red hair/fair skin] |
| 155555 | UV-induced skin damage, vulnerability to |
| 156100 | Meningioma, 607174 |
| 157700 | Mitral valve prolapse, familial |
| 159991 | Myopathy, centronuclear, 160150 |
| 159991 | Becker muscular dystrophy modifier, 310200 |
| 161561 | BCG and salmonella infection, disseminated, 209950 |
| 162000 | Hyperuricemic nephropathy, familial juvenile |
| 162080 | Retinitis pigmentosa, autosomal dominant |
| 162100 | Neuralgic amyotrophy with predilection for brachial |
| | plexus |
| 163000 | Capillary malformations, hereditary |
| 163890 | Parkinson disease, familial, 601508 |
| 164690 | Leukemia, acute myeloid, with eosinophilia |
| 164770 | Myeloid malignancy, predisposition to |
| 164920 | Gastrointestinal stromal tumors |
| 164920 | Germ cell tumors, 273300 |
| 164920 | Mast cell leukemia |
| 164920 | Mastocytosis with associated hematologic disorder |
| 164920 | Piebaldism |
| 164953 | Liposarcoma |
| 168860 | Patella aplasia or hypoplasia |
| 170650 | Periodontitis, juvenile |
| 171190 | Hypertension, essential, 145500 |
| 172471 | Glycogenosis, hepatic, autosomal |
| 173410 | Myelomonocytic leukemia, chronic |
| 173410 | Myeloproliferative disorder with eosinophilia, 131440 |
| 173490 | Gastrointestinal stromal tumor, somatic, 606764 |
| 173490 | Hypereosinophilic syndrome, idiopathic, 607685 |
| 173610 | Platelet al. pha/delta storage pool deficiency |
| 173910 | Polycystic kidney disease, adult, type II |
| 176260 | Episodic ataxia/myokymia syndrome, 160120 |
| 176730 | MODY, one form, 125850 Hyperproinsulinemia, familial |
| 176730 | Diabetes mellitus, rare form |
| 176885 | Insulin resistance, susceptibility to |
| 176960 | Pituitary tumor, invasive |
| 177060 | Polycystic liver disease, 174050 |
| 179095 | Male infertility |
| 179502 | Lymphocytic leukemia, acute T-cell |
| 179820 | [Hyperproreninemia] |
| 180020 | Retinal cone dystrophy-1 |
| 180071 | Retinitis pigmentosa, autosomal recessive |
| 180072 | Night blindness, congenital stationary, type 3, 163500 |
| 180072 | Retinitis pigmentosa, autosomal recessive |
| 181460 | Schistosoma mansoni infection, |
| | susceptibility/resistance to |
| 181800 | Scoliosis, idiopathic 1 |
| 182380 | Glucose/galactose malabsorption, 606824 |
| 182381 | Renal glucosuria, 233100 |
| 182390 | Seizures, afebrile, 604233 |
| 182390 | Seizures, benign familial neonatal-infantile, 604233 |
| 182600 | Spastic paraplegia-3A |
| 186880 | Leukemia/lymphoma, T-cell |
| 188070 | Bleeding disorder due to defective thromboxane |
| | A2 receptor |
| 188826 | Sorsby fundus dystrophy, 136900 |
| 188830 | Myxoma, intracardiac, 255960 |
| 188830 | Pigmented adrenocortical disease, primary isolated, |
| | 160980 |
| 188830 | Thyroid carcinoma, papillary, 188550 |
| 188830 | Carney complex, type 1, 160980 |
| 190020 | Bladder cancer, 109800 |
| 190040 | Giant-cell fibroblastoma |
| 190040 | Meningioma, SIS-related |
| 190040 | Dermatofibrosarcoma protuberans |
| 190195 | Ichthyosiform erythroderma, congenital, 242100 |
| 190195 | Ichthyosis, lamellar, autosomal recessive, 242300 |
| 190195 | Self-healing collodion baby, 242300 |
| 190450 | Hemolytic anemia due to triosephosphate isomerase |
| | deficiency |
| 191043 | Arthrogryposis multiplex congenita, distal, type 2B, |
| | 601680 |
| 191045 | Cardiomyopathy, dilated, 1D, 601494 |
| 191045 | Cardiomyopathy, familial hypertrophic, 2, 115195 |
| 191290 | Segawa syndrome, recessive |
| 191306 | Hemangioma, capillary infantile, somatic, 602089 |
| 192974 | Glycoprotein Ia deficiency |
| 192974 | Neonatal alloimmune thrombocytopenia |
| 194071 | Wilms tumor, type 2 |
| 194071 | Adrenocortical carcinoma, hereditary, 202300 |
| 194190 | Wolf-Hirschhorn syndrome |
| 200990 | Acrocallosal syndrome |
| 204500 | Ceroid-lipofuscinosis, neuronal 2, classic late infantile |
| 216950 | C1r/C1s deficiency, combined |
| 218040 | Costello syndrome |
| 221820 | Gliosis, familial progressive subcortical |
| 226450 | Epidermolysis bullosa inversa, junctional |
| 231670 | Glutaricaciduria, type I |
| 231680 | Glutaricaciduria, type IIA |
| 234000 | Factor XII deficiency |
| 235800 | [Histidinemia] |
| 248310 | Plasmodium falciparum parasitemia, intensity of |
| 252500 | Mucolipidosis II |
| 252500 | Mucolipidosis III |
| 252800 | Mucopolysaccharidosis Ih |
| 252800 | Mucopolysaccharidosis Ih/s |
| 252800 | Mucopolysaccharidosis Is |
| 253000 | Mucopolysaccharidosis IVA |
| 256540 | Galactosialidosis |
| 264470 | Adrenoleukodystrophy, pseudoneonatal |
| 266100 | Epilepsy, pyridoxine-dependent |
| 271900 | Canavan disease |
| 272750 | GM2-gangliosidosis, AB variant |
| 273300 | Male germ cell tumor |
| 276700 | Tyrosinemia, type I |
| 277600 | Weill-Marchesani syndrome |
| 300039 | Deafness, X-linked 3, conductive, with stapes |
| | fixation, 304400 |
| 300135 | Anemia, sideroblastic, with ataxia, 301310 |
| 300142 | Mental retardation, X-linked 30 |
| 300307 | Cleft palate with ankyloglossia, 303400 |
| 300324 | Mental retardation, X-linked-53 |
| 300390 | Choroideremia, 303100 |
| 300405 | Mental retardation, profound |
| 301201 | Amelogenesis imperfecta-3, hypoplastic type |
| 301835 | Arts syndrome |
| 305450 | FG syndrome |
| 309600 | Allan-Herndon syndrome |
| 309605 | Mental retardation, X-linked, syndromic-4, with |
| | congenital contractures and low fingertip arches |
| 311850 | Phosphoribosyl pyrophosphate synthetase-related |
| | gout |
| 314200 | [Euthyroidal hyper- and hypothyroxinemia] |
| 314580 | Wieacker-Wolff syndrome |
| 600031 | [Chitotriosidase deficiency] |
| 600098 | Ovarian carcinoma |
| 600119 | Muscular dystrophy, Duchenne-like, type 2 |
| 600119 | Muscular dystrophy, limb-girdle, type 2D |
| 600119 | Adhalinopathy, primary |
| 600228 | Pseudohypoaldosteronism, type I, 264350 |
| 600243 | Temperature-sensitive apoptosis |
| 600258 | Colorectal cancer, hereditary nonpolyposis, type 3, |
| | 114500 |
| 600276 | Cerebral arteriopathy with subcortical infarcts and |
| | leukoencephalopathy, 125310 |
| 600281 | MODY, type I, 125850 |
| 600281 | Diabetes mellitus, noninsulin-dependent, 125853 |
| 600320 | Diabetes mellitus, insulin-dependent, 5 |
| 600374 | Bardet-Biedl syndrome 4, 209900 |
| 600429 | [Ii blood group, 110800] |
| 600525 | Trichodontoosseous syndrome, 190320 |
| 600555 | Mycobacterial infection, atypical, familial disseminated, |
| | 209950 |
| 600555 | STAT1 deficiency, complete |
| 600618 | Leukemia, acute lymphoblastic |
| 600638 | Fibrosis of extraocular muscles, congenital, 3 |
| 600638 | Fibrosis, congenital, of vertically acting extraocular |
| | muscles |
| 600681 | Long QT syndrome-7, 170390 |
| 600759 | Alzheimer disease-4, 104300 |
| 600760 | Liddle syndrome, 177200 |
| 600760 | Pseudohypoaldosteronism, type I, 264350 |
| 600761 | Liddle syndrome, 177200 |
| 600761 | Pseudohypoaldosteronism, type I, 264350 |
| 600807 | Bronchial asthma |
| 600808 | Enuresis, nocturnal, 2 |
| 600850 | Schizophrenia, 181500 |
| 600856 | Beckwith-Wiedemann syndrome, 130650 |
| 600883 | Diabetes mellitus, insulin-dependent, 8 |
| 600900 | Muscular dystrophy, limb-girdle, type 2E, 604286 |
| 600957 | Persistent Mullerian duct syndrome, type I, 261550 |
| 600977 | Cone dystrophy, progressive |
| 600995 | Nephrotic syndrome, idiopathic, steroid-resistant |
| 601202 | Cataract, anterior polar-2 |
| 601238 | Cerebellar ataxia, Cayman type |
| 601240 | GAMT deficiency |
| 601284 | Hereditary hemorrhagic telangiectasia-2, 600376 |
| 601411 | Muscular dystrophy, limb-girdle, type 2F, 601287 |
| 601411 | Cardiomyopathy, dilated, 1L, 606685 |
| 601596 | Charcot-Marie-Tooth neuropathy, demyelinating |
| 601617 | Fundus albipunctatus, 136880 |
| 601652 | Glaucoma 1A, primary open angle, juvenile-onset, 137750 |
| 601652 | Glaucoma 1A, primary open angle, recessive |
| 601652 | Glaucoma, early-onset, digenic |
| 601680 | Arthrogryposis multiplex congenita, distal, type 2B |
| 601692 | Corneal dystrophy, Avellino type |
| 601692 | Corneal dystrophy, Groenouw type I, 121900 |
| 601692 | Corneal dystrophy, Reis-Bucklers type, 121900 |
| 601692 | Corneal dystrophy, lattice type I, 122200 |
| 601692 | Corneal dystrophy, lattice type IIIA |
| 601768 | Leukemia, acute myeloid |
| 601769 | Osteoporosis, involutional |
| 601769 | Rickets, vitamin D-resistant, 277440 |
| 601837 | LIG4 syndrome, 606593 |
| 601843 | Hypothyroidism, congenital, 274400 |
| 601844 | Pseudohypoaldosteronism type II |
| 601846 | Muscular dystrophy with rimmed vacuoles |
| 601894 | Glomerulopathy, fibronectin |
| 601900 | Multiple myeloma |
| 601975 | Ectodermal dysplasia/skin fragility syndrome, 604536 |
| 602018 | Hirschsprung disease, 142623 |
| 602049 | Neutrophil immunodeficiency syndrome |
| 602063 | Transaldolase deficiency, 606003 |
| 602066 | Convulsions, infantile and paroxysmal choreoathetosis |
| 602087 | Arrhythmogenic right ventricular dysplasia-4 |
| 602089 | Hemangioma, capillary infantile |
| 602096 | Alzheimer disease-5 |
| 602104 | Cherubism, 118400 |
| 602116 | Glioma |
| 602121 | Deafness, autosomal dominant 1, 124900 |
| 602216 | Melanoma, malignant sporadic |
| 602216 | Pancreatic cancer, sporadic |
| 602216 | Peutz-Jeghers syndrome, 175200 |
| 602229 | Waardenburg-Shah syndrome, 277580 |
| 602229 | Waardenburg-Shah syndrome, neurologic variant |
| 602229 | Yemenite deaf-blind hypopigmentation syndrome, |
| | 601706 |
| 602279 | Oculopharyngeal muscular dystorphy, 164300 |
| 602279 | Oculopharyngeal muscular dystrophy, autosomal |
| | recessive, 257950 |
| 602290 | Muscular dystrophy, limb-girdle, type 2H, 254110 |
| 602402 | Lymphedema and ptosis, 153000 |
| 602402 | Lymphedema, hereditary II, 153200 |
| 602402 | Lymphedema-distichiasis syndrome, 153400 |
| 602402 | Yellow nail syndrome, 153300 |
| 602460 | Deafness, autosomal dominant 15, 602459 |
| 602477 | Convulsions, familial febrile, 2 |
| 602544 | Parkinson disease, juvenile, type 2, 600116 |
| 602574 | Deafness, autosomal dominant 12, 601842 |
| 602574 | Deafness, autosomal dominant 8, 601543 |
| 602574 | Deafness, autosomal recessive 21, 603629 |
| 602631 | Lung cancer, 211980 |
| 602631 | Rhabdomyosarcoma, 268210 |
| 602631 | Breast cancer, 114480 |
| 602700 | Colorectal cancer, 114500 |
| 602723 | Psoriasis, susceptibility to, 177900 |
| 602783 | Spastic paraplegia-7 |
| 603030 | Endotoxin hyporesponsiveness |
| 603075 | Macular degeneration, age-related, 1 |
| 603113 | Lung cancer, 211980 |
| 603175 | Schizophrenia, 181500 |
| 603221 | Myopia-3 |
| 603288 | Cornea plana congenita, recessive, 217300 |
| 603345 | Renal tubular acidosis, proximal, with ocular |
| | abnormalities, 604278 |
| 603377 | Carnitine deficiency, systemic primary, 212140 |
| 603386 | Thyroid carcinoma, nonmedullary, with cell oxyphilia |
| 603426 | Advanced sleep phase syndrome, familial, 604348 |
| 603513 | Spastic cerebral palsy, symmetric |
| 603516 | Spinocerebellar ataxia-10 |
| 603590 | Meningioma |
| 603593 | Lysinuric protein intolerance, 222700 |
| 603644 | Hepatic failure, early onset, and neurologic disorder |
| 603694 | Diabetes mellitus, noninsulin-dependent, 125853 |
| 603743 | Schizophrenia, 181500 |
| 603795 | Charcot-Marie-Tooth disease, type 1C, 601098 |
| 603860 | Medullary cystic kidney disease 2 |
| 603964 | Deafness, autosomal dominant 16 |
| 603967 | Hyperkalemic periodic paralysis, 170500 |
| 603967 | Hypokalemic periodic paralysis, 170400 |
| 603967 | Myotonia congenita, atypical, acetazolamide-responsive, |
| | 170500 |
| 603967 | Paramyotonia congenita, 168300 |
| 603967 | Cramps, familial, potassium-aggravated |
| 604025 | Colorectal cancer, 114500 |
| 604061 | Leukemia, acute myeloid, therapy-related |
| 604061 | Ovarian carcinoma |
| 604103 | Muscular dystrophy, limb-girdle, type 1A, 159000 |
| 604210 | Leber congenital amaurosis, 204000 |
| 604210 | Retinitis pigmentosa-12, autosomal recessive, 600105 |
| 604272 | Cardioencephalomyopathy, fatal infantile, due to |
| | cytochrome c oxidase deficiency, 604377 |
| 604283 | Camptodactyly-arthropathy-coxa vara-pericarditis |
| | syndrome, 208250 |
| 604313 | Galactokinase deficiency with cataracts, 230200 |
| 604325 | Spinocerebellar ataxia 12, 604326 |
| 604332 | Leukemia, acute myeloid |
| 604403 | Convulsions, familial febrile, 3 |
| 604443 | Myelodysplastic syndrome |
| 604443 | Myelogenous leukemia, acute |
| 604485 | Retinitis pigmentosa, late onset, 268000 |
| 604485 | Enhanced S-cone syndrome, 268100 |
| 604489 | Alpha-methylacyl-CoA racemase deficiency |
| 604614 | Adrenocorticotropic hormone deficiency, 201400 |
| 604717 | Deafness autosomal dominant 26 |
| 604717 | Deafness, autosomal dominant 20 |
| 604766 | Nephrotic syndrome, steroid-resistant, 600995 |
| 604767 | Esophageal squamous cell carcinoma, 133239 |
| 604781 | Ichthyosis, nonlamellar and nonerythrodermic, |
| | congenital |
| 605010 | Netherton syndrome, 256500 |
| 605010 | Atopy, 147050 |
| 605205 | Hypercalciuria, absorptive, susceptibility to, |
| | 143870 |
| 605232 | Pseudohypoaldosteronism, type IIC |
| 605248 | Mucolipidosis IV, 252650 |
| 605257 | Immunodeficiency with hyper-IgM, type 2, 605258 |
| 605268 | Huntington disease-like 2, 606438 |
| 605270 | Sanfilippo syndrome, type A, 252900 |
| 605286 | Diabetes mellitus, non-insulin dependent, 1, 601283 |
| 605370 | Leukemia, juvenile myelomonocytic |
| 605423 | Gonadal dysgenesis, 46XY, partial, with |
| | minifascicular neuropathy, 607080 |
| 605429 | [Deafness, nonsyndromic, modifier 1] |
| 605463 | Radiation sensitivity/chromosome instability |
| | syndrome, autosomal dominant |
| 605472 | Usher syndrome, type 2C |
| 605481 | Microcephaly, primary autosomal recessive, 5, 251200 |
| 605544 | Fibromatosis, gingival, 2, 135300 |
| 605549 | Cone-rod dystrophy 8 |
| 605583 | Deafness, autosomal dominant 25 |
| 605598 | Diabetes mellitus, insulin-dependent, 18 |
| 605751 | Convulsions, benign familial infantile, 2 |
| 605779 | Nail dysplasia, isolated congenital |
| 605805 | Dermatitis, atopic, 603165 |
| 605809 | Myasthenia gravis, familial infantile, 1, 254210 |
| 605818 | Deafness, autosomal recessive 27 |
| 605828 | Epidermodysplasia verruciformis, 226400 |
| 605829 | Epidermodysplasia verruciformis, 226400 |
| 605841 | Narcolepsy, 161400 |
| 605845 | Dermatitis, atopic, 603165 |
| 605934 | Holoprosencephaly-6, 236100 |
| 606078 | Megakaryoblastic leukemia, acute |
| 606236 | Alveolar soft-part sarcoma, 606243 |
| 606257 | Stature QTL 12 |
| 606258 | Stature QTL 13 |
| 606263 | Paget disease of bone, 602080 |
| 606272 | Cystinosis, atypical nephropathic |
| 606272 | Cystinosis, late-onset juvenile or adolescent |
| | nephropathic, 219900 |
| 606272 | Cystinosis, nephropathic, 219800 |
| 606272 | Cystinosis, ocular nonnephropathic, 219750 |
| 606348 | Inflammatory bowel disease-5, 266600 |
| 606439 | Spastic paraplegia-3A, 182600 |
| 606482 | Charcot-Marie-Tooth disease, dominant intermediate 1 |
| 606521 | Microcephaly, Amish type, 607196 |
| 606531 | Asthma, susceptibility to, 600807 |
| 606579 | Systemic lupus erythematosus, vitiligo-related, |
| | susceptibility to, 1 |
| 606585 | Amelogenesis imperfecta 2, hypoplastic local, 104500 |
| 606675 | Inflammatory bowel disease-4, 266600 |
| 606718 | Atelosteogenesis II, 256050 |
| 606718 | Achondrogenesis Ib, 600972 |
| 606718 | Diastrophic dysplasia, 222600 |
| 606718 | Diastrophic dysplasia, broad bone-platyspondylic |
| | variant |
| 606718 | Epiphyseal dysplasia, multiple, 226900 |
| 606725 | Ceroid-lipofuscinosis, neuronal-6, variant late |
| | infantile, 601780 |
| 606800 | Glycogen storage disease II, 232300 |
| 606847 | Treacher Collins mandibulofacial dysostosis, 154500 |
| 606869 | GM2-gangliosidosis, several forms, 272800 |
| 606869 | Tay-Sachs disease, 272800 |
| 606869 | [Hex A pseudodeficiency], 272800 |
| 606885 | Acyl-CoA dehydrogenase, short-chain, deficiency of, |
| | 201470 |
| 606945 | Hypercholesterolemia, familial, 143890 |
| 607004 | Brachydactyly, type A1, 112500 |
| 607060 | Parkinson disease, 168600 |
| 607084 | Deafness, autosomal recessive 31 |
| 607139 | Fanconi anemia, complementation group A, 227650 |
| 607151 | Moyamoya disease 2 |
| 607199 | Popliteal pterygium syndrome, 119500 |
| 607199 | van der Woude syndrome, 119300 |
| 607248 | Glioma of brain, 137800 |
| 607252 | Schizophrenia, 181500 |
| 607254 | Schizophrenia, 181500 |
| 607324 | Polydactyly, postaxial, type A3 |
| 607393 | Hyperparathyroidism, familial primary, 145000 |
| 607393 | Hyperparathyroidism-jaw tumor syndrome, 145001 |
| 607393 | Parathyroid adenoma with cystic changes, 145001 |
| 607473 | Vitamin D-dependent coagulation defect 2 |
| 607516 | Migraine with or without aura, susceptibility to |
| 607516 | Migraine, familial hemiplegic |
| 607542 | Jervell and Lange-Nielsen syndrome, 220400 |
| 607542 | Long QT syndrome-1, 192500 |
| 607542 | Atrial fibrillation, familial, 607554 |
| 607690 | Anderson disease, 607689 |
| 607690 | Chylomicron retention disease with Marinesco-Sjogren |
| | syndrome, 607692 |
| 607690 | Chylomicron retention disease, 246700 |
| 607696 | Usher syndrome, type 1G, 606943 |

[0279] RACE Protocol for Recovery of Full-Length Genes

[0280] Partial cDNA clones can be made full-length by utilizing the rapid amplification of cDNA ends (RACE) procedure described in Frohman, M. A., et al., Proc. Nat'l. Acad. Sci. USA, 85:8998-9002 (1988). A cDNA clone missing either the 5′ or 3′ end can be reconstructed to include the absent base pairs extending to the translational start or stop codon, respectively. In some cases, cDNAs are missing the start codon of translation, therefor. The following briefly describes a modification of this original 5′ RACE procedure. Poly A+ or total RNA is reverse transcribed with Superscript II (Gibco/BRL) and an antisense or complementary primer specific to the cDNA sequence. The primer is removed from the reaction with a Microcon Concentrator (Amicon). The first-strand cDNA is then tailed with dATP and terminal deoxynucleotide transferase (Gibco/BRL). Thus, an anchor sequence is produced which is needed for PCR amplification. The second strand is synthesized from the dA-tail in PCR buffer, Taq DNA polymerase (Perkin-Elmer Cetus), an oligo-dT primer containing three adjacent restriction sites (XhoI, SalI and ClaI) at the 5′ end and a primer containing just these restriction sites. This double-stranded cDNA is PCR amplified for 40 cycles with the same primers as well as a nested cDNA-specific antisense primer. The PCR products are size-separated on an ethidium bromide-agarose gel and the region of gel containing cDNA products the predicted size of missing protein-coding DNA is removed. cDNA is purified from the agarose with the Magic PCR Prep kit (Promega), restriction digested with XhoI or SalI, and ligated to a plasmid such as pBluescript SKII (Stratagene) at XhoI and EcoRV sites. This DNA is transformed into bacteria and the plasmid clones sequenced to identify the correct protein-coding inserts. Correct 5′ ends are confirmed by comparing this sequence with the putatively identified homologue and overlap with the partial cDNA clone. Similar methods known in the art and/or commercial kits are used to amplify and recover 3′ ends.

[0281] Several quality-controlled kits are commercially available for purchase. Similar reagents and methods to those above are supplied in kit form from Gibco/BRL for both 5′ and 3′ RACE for recovery of full length genes. A second kit is available from Clontech which is a modification of a related technique, SLIC (single-stranded ligation to single-stranded cDNA), developed by Dumas et al., Nucleic Acids Res., 19:5227-32 (1991). The major differences in procedure are that the RNA is alkaline hydrolyzed after reverse transcription and RNA ligase is used to join a restriction site-containing anchor primer to the first-strand cDNA. This obviates the necessity for the dA-tailing reaction which results in a polyT stretch that is difficult to sequence past.

[0282] An alternative to generating 5′ or 3′ cDNA from RNA is to use cDNA library double-stranded DNA. An asymmetric PCR-amplified antisense cDNA strand is synthesized with an antisense cDNA-specific primer and a plasmid-anchored primer. These primers are removed and a symmetric PCR reaction is performed with a nested cDNA-specific antisense primer and the plasmid-anchored primer.

[0283] RNA Ligase Protocol for Generating the 5′ or 3′ End Sequences to Obtain Full Length Genes

[0284] Once a gene of interest is identified, several methods are available for the identification of the 5′ or 3′ portions of the gene which may not be present in the original cDNA plasmid. These methods include, but are not limited to, filter probing, clone enrichment using specific probes and protocols similar and identical to 5′ and 3′ RACE. While the full length gene may be present in the library and can be identified by probing, a useful method for generating the 5′ or 3′ end is to use the existing sequence information from the original cDNA to generate the missing information. A method similar to 5′ RACE is available for generating the missing 5′ end of a desired full-length gene. (This method was published by Fromont-Racine et al., Nucleic Acids Res., 21(7):1683-1684 (1993)). Briefly, a specific RNA oligonucleotide is ligated to the 5′ ends of a population of RNA presumably containing full-length gene RNA transcript and a primer set containing a primer specific to the ligated RNA oligonucleotide and a primer specific to a known sequence of the gene of interest, is used to PCR amplify the 5′ portion of the desired full length gene which may then be sequenced and used to generate the full length gene. This method starts with total RNA isolated from the desired source, poly A RNA may be used but is not a prerequisite for this procedure. The RNA preparation may then be treated with phosphatase if necessary to eliminate 5′ phosphate groups on degraded or damaged RNA which may interfere with the later RNA ligase step. The phosphatase if used is then inactivated and the RNA is treated with tobacco acid pyrophosphatase in order to remove the cap structure present at the 5′ ends of messenger RNAs. This reaction leaves a 5′ phosphate group at the 5′ end of the cap cleaved RNA which can then be ligated to an RNA oligonucleotide using T4 RNA ligase. This modified RNA preparation can then be used as a template for first strand cDNA synthesis using a gene specific oligonucleotide. The first strand synthesis-reaction can then be used as a template for PCR amplification of the desired 5′ end using a primer specific to the ligated RNA oligonucleotide and a primer specific to the known sequence of the gene of interest. The resultant product is then sequenced and analyzed to confirm that the 5′ end sequence belongs to the relevant gene.

[0285] The present invention also relates to vectors or plasmids which include such DNA sequences, as well as the use of the DNA sequences. The material deposited with the ATCC (e.g., as described in columns 2 and 3 of Table 1A, and/or as set forth in Table 1B) is a mixture of cDNA clones derived from a variety of human tissue and cloned in either a plasmid vector or a phage vector, as described, for example, in Table 1A. These deposits are referred to as “the deposits” herein. The deposited material includes cDNA clones corresponding to SEQ ID NO:X described, for example, in Table 1A and/or 1B (ATCC Deposit No:Z). A clone which is isolatable from the ATCC Deposits by use of a sequence listed as SEQ ID NO:X, may include the entire coding region of a human gene or in other cases such clone may include a substantial portion of the coding region of a human gene. Furthermore, although the sequence listing may in some instances list only a portion of the DNA sequence in a clone included in the ATCC Deposits, it is well within the ability of one skilled in the art to sequence the DNA included in a clone contained in the ATCC Deposits by use of a sequence (or portion thereof) described in, for example Tables 1A and/or 1B or 2, by procedures hereinafter further described, and others apparent to those skilled in the art.

[0286] Also provided in Table 1A is the name of the vector which contains the cDNA clone. Each vector is routinely used in the art. The following additional information is provided for convenience.

[0287] Vectors Lambda Zap (U.S. Pat. Nos. 5,128,256 and 5,286,636), Uni-Zap XR (U.S. Pat. Nos. 5,128,256 and 5,286,636), Zap Express (U.S. Pat. Nos. 5,128,256 and 5,286,636), pBluescript (pBS) (Short, J. M. et al., Nucleic Acids Res. 16:7583-7600 (1988); Alting-Mees, M. A. and Short, J. M., Nucleic Acids Res. 17:9494 (1989)) and pBK (Alting-Mees, M. A. et al., Strategies 5:58-61 (1992)) are commercially available from Stratagene Cloning Systems, Inc., 11011 N. Torrey Pines Road, La Jolla, Calif., 92037. pBS contains an ampicillin resistance gene and pBK contains a neomycin resistance gene. Phagemid pBS may be excised from the Lambda Zap and Uni-Zap XR vectors, and phagemid pBK may be excised from the Zap Express vector. Both phagemids may be transformed into E. coli strain XL-1 Blue, also available from Stratagene.

[0288] Vectors pSport1, pCMVSport 1.0, pCMVSport 2.0, pCMVSport 3.0, and pCMVSport 6 were obtained from Life Technologies, Inc., P. O. Box 6009, Gaithersburg, Md. 20897. All Sport vectors contain an ampicillin resistance gene and may be transformed into E. coli strain DH10B, also available from Life Technologies. See, for instance, Gruber, C. E., et al., Focus 15:59- (1993). Vector lafmid BA (Bento Soares, Columbia University, New York, N.Y.) contains an ampicillin resistance gene and can be transformed into E. coli strain XL-1 Blue. Vector pCR®2.1, which is available from Invitrogen, 1600 Faraday Avenue, Carlsbad, Calif. 92008, contains an ampicillin resistance gene and may be transformed into E. coli strain DH10B, available from Life Technologies. See, for instance, Clark, J. M., Nuc. Acids Res. 16:9677-9686 (1988) and Mead, D. et al., Bio/Technology 9: (1991).

[0289] The present invention also relates to the genes corresponding to SEQ ID NO:X, SEQ ID NO:Y, and/or the deposited clone (ATCC Deposit No:Z). The corresponding gene can be isolated in accordance with known methods using the sequence information disclosed herein. Such methods include preparing probes or primers from the disclosed sequence and identifying or amplifying the corresponding gene from appropriate sources of genomic material.

[0290] Also provided in the present invention are allelic variants, orthologs, and/or species homologs. Procedures known in the art can be used to obtain full-length genes, allelic variants, splice variants, full-length coding portions, orthologs, and/or species homologs of genes corresponding to SEQ ID NO:X or the complement thereof, polypeptides encoded by genes corresponding to SEQ ID NO:X or the complement thereof, and/or the cDNA contained in ATCC Deposit No:Z, using information from the sequences disclosed herein or the clones deposited with the ATCC. For example, allelic variants and/or species homologs may be isolated and identified by making suitable probes or primers from the sequences provided herein and screening a suitable nucleic acid source for allelic variants and/or the desired homologue.

[0291] The polypeptides of the invention can be prepared in any suitable manner. Such polypeptides include isolated naturally occurring polypeptides, recombinantly produced polypeptides, synthetically produced polypeptides, or polypeptides produced by a combination of these methods. Means for preparing such polypeptides are well understood in the art.

[0292] The polypeptides may be in the form of the secreted protein, including the mature form, or may be a part of a larger protein, such as a fusion protein (see below). It is often advantageous to include an additional amino acid sequence which contains secretory or leader sequences, pro-sequences, sequences which aid in purification, such as multiple histidine residues, or an additional sequence for stability during recombinant production.

[0293] The polypeptides of the present invention are preferably provided in an isolated form, and preferably are substantially purified. A recombinantly produced version of a polypeptide, including the secreted polypeptide, can be substantially purified using techniques described herein or otherwise known in the art, such as, for example, by the one-step method described in Smith and Johnson, Gene 67:3140 (1988). Polypeptides of the invention also can be purified from natural, synthetic or recombinant sources using techniques described herein or otherwise known in the art, such as, for example, antibodies of the invention raised against the polypeptides of the present invention in methods which are well known in the art.

Mature Polypeptides

[0294] The present invention also encompasses mature forms of a polypeptide having the amino acid sequence of SEQ ID NO:Y and/or the amino acid sequence encoded by the cDNA in a deposited clone. Polynucleotides encoding the mature forms (such as, for example, the polynucleotide sequence in SEQ ID NO:X and/or the polynucleotide sequence contained in the cDNA of a deposited clone) are also encompassed by the invention. Moreover, fragments or variants of these polypeptides (such as, fragments as described herein, polypeptides at least 80%, 85%, 90%, 95%, 96%, 97%, 98%, 99%, or 100% identical to these polypeptides, or polypeptides encoded by a polynucleotide that hybridizes under stringent conditions to the complementary strand of the polynucleotide encoding these polypeptides) are also encompassed by the invention. In preferred embodiments, these fragments or variants retain one or more functional acitivities of the full-length or mature form of the polypeptide (e.g., biological activity (such as, for example, activity in detecting, preventing, treating and/or indicated disorders), antigenicity (ability to bind, or compete with a polypeptide of the invention for binding, to an anti-polypeptide of the invention antibody), immunogenicity (ability to generate antibody which binds to a specific polypeptide of the invention), ability to form multimers with polypeptides of the invention, and ability to bind to a receptor or ligand for a polypeptide of the invention). Antibodies that bind the polypeptides of the invention, and polynucleotides encoding these polypeptides are also encompassed by the invention.

[0295] According to the signal hypothesis, proteins secreted by mammalian cells have a signal or secretary leader sequence which is cleaved from the mature protein once export of the growing protein chain across the rough endoplasmic reticulum has been initiated. Most mammalian cells and even insect cells cleave secreted proteins with the same specificity. However, in some cases, cleavage of a secreted protein is not entirely uniform, which results in two or more mature species of the protein. Further, it has long been known that cleavage specificity of a secreted protein is ultimately determined by the primary structure of the complete protein, that is, it is inherent in the amino acid sequence of the polypeptide.

[0296] Methods for predicting whether a protein has a signal sequence, as well as the cleavage point for that sequence, are available. For instance, the method of McGeoch, Virus Res. 3:271-286 (1985), uses the information from a short N-terminal charged region and a subsequent uncharged region of the complete (uncleaved) protein. The method of von Heinje, Nucleic Acids Res. 14:4683-4690 (1986) uses the information from the residues surrounding the cleavage site, typically residues −13 to +2, where +1 indicates the amino terminus of the secreted protein. The accuracy of predicting the cleavage points of known mammalian secretory proteins for each of these methods is in the range of 75-80%. (von Heinje, supra.) However, the two methods do not always produce the same predicted cleavage point(s) for a given protein.

[0297] In the present case, the deduced amino acid sequence of the secreted polypeptide was analyzed by a computer program called SignalP (Henrik Nielsen et al., Protein Engineering 10:1-6 (1997)), which predicts the cellular location of a protein based on the amino acid sequence. As part of this computational prediction of localization, the methods of McGeoch and von Heinje are incorporated. The analysis of the amino acid sequences of the secreted proteins described herein by this program provided the results shown in Table 1A.

[0298] In specific embodiments, polypeptides of the invention comprise, or alternatively consist of, the predicted mature form of the polypeptide as delineated in columns 14 and 15 of Table 1A. Moreover, fragments or variants of these polypeptides (such as, fragments as described herein, polypeptides at least 80%, 85%, 90%, 95%, 96%, 97%, 98%, 99%, or 100% identical to these polypeptides, or polypeptides encoded by a polynucleotide that hybridizes under stringent conditions to the complementary strand of the polynucleotide encoding these polypeptides) are also encompassed by the invention. In preferred embodiments, these fragments or variants retain one or more functional acitivities of the full-length or mature form of the polypeptide (e.g., biological activity, antigenicity [ability to bind (or compete with a polypeptide of the invention for binding) to an anti-polypeptide of the invention antibody], immunogenicity (ability to generate antibody which binds to a specific polypeptide of the invention), ability to form multimers with polypeptides of the invention, and ability to bind to a receptor or ligand for a polypeptide of the invention). Antibodies that bind the polypeptides of the invention, and polynucleotides encoding these polypeptides are also encompassed by the invention.

[0299] Polynucleotides encoding proteins comprising, or consisting of, the predicted mature form of polypeptides of the invention (e.g., polynucleotides having the sequence of SEQ ID NO: X (Table 1A, column 5), the sequence delineated in columns 7 and 8 of Table 1A, and a sequence encoding the mature polypeptide delineated in columns 14 and 15 of Table 1A (e.g., the sequence of SEQ ID NO:X encoding the mature polypeptide delineated in columns 14 and 15 of Table 1A)) are also encompassed by the invention, as are fragments or variants of these polynucleotides (such as, fragments as described herein, polynucleotides at least 80%, 85%, 90%, 95%, 96%, 97%, 98%, 99%, or 100% identical to these polyncueotides, and nucleic acids which hybridizes under stringent conditions to the complementary strand of the polynucleotide).

[0300] As one of ordinary skill would appreciate, however, cleavage sites sometimes vary from organism to organism and cannot be predicted with absolute certainty. Accordingly, the present invention provides secreted polypeptides having a sequence shown in SEQ ID NO:Y which have an N-terminus beginning within 15 residues of the predicted cleavage point (i.e., having 1, 2, 3, 4, 5, 6, 7, 8 , 9, 10, 11, 12, 13, 14, or 15 more or less contiguous residues of SEQ ID NO:Y at the N-terminus when compared to the predicted mature form of the polypeptide (e.g., the mature polypeptide delineated in columns 14 and 15 of Table 1A). Similarly, it is also recognized that in some cases, cleavage of the signal sequence from a secreted protein is not entirely uniform, resulting in more than one secreted species. These polypeptides, and the polynucleotides encoding such polypeptides, are contemplated by the present invention.

[0301] Moreover, the signal sequence identified by the above analysis may not necessarily predict the naturally occurring signal sequence. For example, the naturally occurring signal sequence may be further upstream from the predicted signal sequence. However, it is likely that the predicted signal sequence will be capable of directing the secreted protein to the ER. Nonetheless, the present invention provides the mature protein produced by expression of the polynucleotide sequence of SEQ ID NO:X and/or the polynucleotide sequence contained in the cDNA of a deposited clone, in a mammalian cell (e.g., COS cells, as desribed below). These polypeptides, and the polynucleotides encoding such polypeptides, are contemplated by the present invention.

Polynucleotide and Polypeptide Variants

[0302] The present invention is also directed to variants of the polynucleotide sequence disclosed in SEQ ID NO:X or the complementary strand thereto, nucleotide sequences encoding the polypeptide of SEQ ID NO:Y, the nucleotide sequence of SEQ ID NO:X that encodes the polypeptide sequence as defined in columns 12 and 15 of Table 1A, nucleotide sequences encoding the polypeptide sequence as defined in columns 14 and 15 of Table 1A, the nucleotide sequence of SEQ ID NO:X encoding the polypeptide sequence as defined in column 5 of Table 1B, nucleotide sequences encoding the polypeptide as defined in column 6 and column 7 of Table 1B, the nucleotide sequence as defined in columns 8 and 9 of Table 2, nucleotide sequences encoding the polypeptide encoded by the nucleotide sequence as defined in columns 8 and 9 of Table 2, the cDNA sequence contained in ATCC Deposit NO:Z, the nucleotide sequences encoding the polypeptide encoded by the cDNA sequence contained in ATCC Deposit NO:Z, and/or the nucleotide sequences encoding a mature (secreted) polypeptide encoded by the cDNA sequence contained in ATCC Deposit NO:Z.

[0303] The present invention also encompasses variants of the polypeptide sequence disclosed in SEQ ID NO:Y, the polypeptide as defined in columns 12 and 15 of Table 1A, the polypeptide sequence as defined in columns 6 and 7 of Table 1B, a polypeptide sequence encoded by the polynucleotide sequence in SEQ ID NO:X, a polypeptide sequence encoded by the nucleotide sequence as defined in columns 8 and 9 of Table 2, a polypeptide sequence encoded by the complement of the polynucleotide sequence in SEQ ID NO:X, the polypeptide sequence encoded by the cDNA sequence contained in ATCC Deposit NO:Z and/or a mature (secreted) polypeptide encoded by the cDNA sequence contained in ATCC Deposit NO:Z.

[0304] “Variant” refers to a polynucleotide or polypeptide differing from the polynucleotide or polypeptide of the present invention, but retaining essential properties thereof. Generally, variants are overall closely similar, and, in many regions, identical to the polynucleotide or polypeptide of the present invention.

[0305] Thus, one aspect of the invention provides an isolated nucleic acid molecule comprising, or alternatively consisting of, a polynucleotide having a nucleotide sequence selected from the group consisting of: (a) a nucleotide sequence described in SEQ ID NO:X or contained in the cDNA sequence of ATCC Deposit No:Z; (b) a nucleotide sequence in SEQ ID NO:X or the cDNA in ATCC Deposit No:Z which encodes the complete amino acid sequence of SEQ ID NO:Y or the complete amino acid sequence encoded by the cDNA in ATCC Deposit No:Z; (c) a nucleotide sequence in SEQ ID NO:X or the cDNA in ATCC Deposit No:Z which encodes a mature polypeptide (i.e., a secreted polypeptide (e.g., as delineated in columns 14 and 15 of Table 1A)); (d) a nucleotide sequence in SEQ ID NO:X or the cDNA sequence of ATCC Deposit No:Z, which encodes a biologically active fragment of a polypeptide; (e) a nucleotide sequence in SEQ ID NO:X or the cDNA sequence of ATCC Deposit No:Z, which encodes an antigenic fragment of a polypeptide; (f) a nucleotide sequence encoding a polypeptide comprising the complete amino acid sequence of SEQ ID NO:Y or the complete amino acid sequence encoded by the cDNA in ATCC Deposit No:Z; (g) a nucleotide sequence encoding a mature polypeptide of the amino acid sequence of SEQ ID NO:Y (i.e., a secreted polypeptide (e.g., as delineated in columns 14 and 15 of Table 1A)) or a mature polypeptide of the amino acid sequence encoded by the cDNA in ATCC Deposit No:Z ; (h) a nucleotide sequence encoding a biologically active fragment of a polypeptide having the complete amino acid sequence of SEQ ID NO:Y or the complete amino acid sequence encoded by the cDNA in ATCC Deposit No:Z; (i) a nucleotide sequence encoding an antigenic fragment of a polypeptide having the complete amino acid sequence of SEQ ID NO:Y or the complete amino acid sequence encoded by the cDNA in ATCC Deposit No:Z; and (j) a nucleotide sequence complementary to any of the nucleotide sequences in (a), (b), (c), (d), (e), (f), (g), (h), or (i) above.

[0306] The present invention is also directed to nucleic acid molecules which comprise, or alternatively consist of, a nucleotide sequence which is at least 80%, 85%, 90%, 95%, 96%, 97%, 98%, 99% or 100%, identical to, for example, any of the nucleotide sequences in (a), (b), (c), (d), (e), (f), (g), (h), (i), or (j) above, the nucleotide coding sequence in SEQ ID NO:X or the complementary strand thereto, the nucleotide coding sequence of the cDNA contained in ATCC Deposit No:Z or the complementary strand thereto, a nucleotide sequence encoding the polypeptide of SEQ ID NO:Y, a nucleotide sequence encoding a polypeptide sequence encoded by the nucleotide sequence in SEQ ID NO:X, a polypeptide sequence encoded by the complement of the polynucleotide sequence in SEQ ID NO:X, a nucleotide sequence encoding the polypeptide encoded by the cDNA contained in ATCC Deposit No:Z, the nucleotide coding sequence in SEQ ID NO:X as defined in columns 8 and 9 of Table 2 or the complementary strand thereto, a nucleotide sequence encoding the polypeptide encoded by the nucleotide sequence in SEQ ID NO:X as defined in columns 8 and 9 of Table 2 or the complementary strand thereto, the nucleotide sequence in SEQ ID NO:X encoding the polypeptide sequence as defined in columns 5 and 6 of Table 1B or the complementary strand thereto, nucleotide sequences encoding the polypeptide as defined in column 5 and 6 of Table 1B or the complementary strand thereto, and/or polynucleotide fragments of any of these nucleic acid molecules (e.g., those fragments described herein). Polynucleotides which hybridize to the complement of these nucleic acid molecules under stringent hybridization conditions or alternatively, under lower stringency conditions, are also encompassed by the invention, as are polypeptides encoded by these polynucleotides and nucleic acids.

[0307] In a preferred embodiment, the invention encompasses nucleic acid molecules which comprise, or alternatively, consist of a polynucleotide which hybridizes under stringent hybridization conditions, or alternatively, under lower stringency conditions, to a polynucleotide in (a), (b), (c), (d), (e), (f), (g), (h), or (i), above, as are polypeptides encoded by these polynucleotides. In another preferred embodiment,. polynucleotides which hybridize to the complement of these nucleic acid molecules under stringent hybridization conditions, or alternatively, under lower stringency conditions, are also encompassed by the invention, as are polypeptides encoded by these polynucleotides.

[0308] In another embodiment, the invention provides a purified protein comprising, or alternatively consisting of, a polypeptide having an amino acid sequence selected from the group consisting of: (a) the complete amino acid sequence of SEQ ID NO:Y or the complete amino acid sequence encoded by the cDNA in ATCC Deposit No:Z; (b) the amino acid sequence of a mature (secreted) form of a polypeptide having the amino acid sequence of SEQ ID NO:Y (e.g., as delineated in columns 14 and 15 of Table 1A) or a mature form of the amino acid sequence encoded by the cDNA in ATCC Deposit No:Z mature; (c) the amino acid sequence of a biologically active fragment of a polypeptide having the complete amino acid sequence of SEQ ID NO:Y or the complete amino acid sequence encoded by the cDNA in ATCC Deposit No:Z; and (d) the amino acid sequence of an antigenic fragment of a polypeptide having the complete amino acid sequence of SEQ ID NO:Y or the complete amino acid sequence encoded by the cDNA in ATCC Deposit No:Z.

[0309] The present invention is also directed to proteins which comprise, or alternatively consist of, an amino acid sequence which is at least 80%, 85%, 90%, 95%, 96%, 97%, 98%, 99% or 100%, identical to, for example, any of the amino acid sequences in (a), (b), (c), or (d), above, the amino acid sequence shown in SEQ ID NO:Y, the amino acid sequence encoded by the cDNA contained in ATCC Deposit No:Z, the amino acid sequence of the polypeptide encoded by the nucleotide sequence in SEQ ID NO:X as defined in columns 8 and 9 of Table 2, the amino acid sequence as defined in column 5 and 6 of Table 1B, an amino acid sequence encoded by the nucleotide sequence in SEQ ID NO:X, and an amino acid sequence encoded by the complement of the polynucleotide sequence in SEQ ID NO:X. Fragments of these polypeptides are also provided (e.g., those fragments described herein). Further proteins encoded by polynucleotides which hybridize to the complement of the nucleic acid molecules encoding these amino acid sequences under stringent hybridization conditions or alternatively, under lower stringency conditions, are also encompassed by the invention, as are the polynucleotides encoding these proteins.

[0310] By a nucleic acid having a nucleotide sequence at least, for example, 95% “identical” to a reference nucleotide sequence of the present invention, it is intended that the nucleotide sequence of the nucleic acid is identical to the reference sequence except that the nucleotide sequence may include up to five point mutations per each 100 nucleotides of the reference nucleotide sequence encoding the polypeptide. In other words, to obtain a nucleic acid having a nucleotide sequence at least 95% identical to a reference nucleotide sequence, up to 5% of the nucleotides in the reference sequence may be deleted or substituted with another nucleotide, or a number of nucleotides up to 5% of the total nucleotides in the reference sequence may be inserted into the reference sequence. The query sequence may be an entire sequence referred to in Table 1B or 2 as the ORF (open reading frame), or any fragment specified as described herein.

[0311] As a practical matter, whether any particular nucleic acid molecule or polypeptide is at least 80%, 85%, 90%, 95%, 96%, 97%, 98% or 99% identical to a nucleotide sequence of the present invention can be determined conventionally using known computer programs. A preferred method for determining the best overall match between a query sequence (a sequence of the present invention) and a subject sequence, also referred to as a global sequence alignment, can be determined using the FASTDB computer program based on the algorithm of Brutlag et al. (Comp. App. Biosci. 6:237-245 (1990)). In a sequence alignment the query and subject sequences are both DNA sequences. An RNA sequence can be compared by converting U's to T's. The result of said global sequence alignment is expressed as percent identity. Preferred parameters used in a FASTDB alignment of DNA sequences to calculate percent identity are: Matrix=Unitary, k-tuple=4, Mismatch Penalty=1, Joining Penalty=30, Randomization Group Length=0, Cutoff Score=1, Gap Penalty=5, Gap Size Penalty 0.05, Window Size=500 or the length of the subject nucleotide sequence, whichever is shorter.

[0312] If the subject sequence is shorter than the query sequence because of 5′ or 3′ deletions, not because of internal deletions, a manual correction must be made to the results. This is because the FASTDB program does not account for 5′ and 3′ truncations of the subject sequence when calculating percent identity. For subject sequences truncated at the 5′ or 3′ ends, relative to the query sequence, the percent identity is corrected by calculating the number of bases of the query sequence that are 5′ and 3′ of the subject sequence, which are not matched/aligned, as a percent of the total bases of the query sequence. Whether a nucleotide is matched/aligned is determined by results of the FASTDB sequence alignment. This percentage is then subtracted from the percent identity, calculated by the above FASTDB program using the specified parameters, to arrive at a final percent identity score. This corrected score is what is used for the purposes of the present invention. Only bases outside the 5′ and 3′ bases of the subject sequence, as displayed by the FASTDB alignment, which are not matched/aligned with the query sequence, are calculated for the purposes of manually adjusting the percent identity score.

[0313] For example, a 90 base subject sequence is aligned to a 100 base query sequence to determine percent identity. The deletions occur at the 5′ end of the subject sequence and therefore, the FASTDB alignment does not show a matched/alignment of the first 10 bases at 5′ end. The 10 unpaired bases represent 10% of the sequence (number of bases at the 5′ and 3′ ends not matched/total number of bases in the query sequence) so 10% is subtracted from the percent identity score calculated by the FASTDB program. If the remaining 90 bases were perfectly matched the final percent identity would be 90%. In another example, a 90 base subject sequence is compared with a 100 base query sequence. This time the deletions are internal deletions so that there are no bases on the 5′ or 3′ of the subject sequence which are not matched/aligned with the query. In this case the percent identity calculated by FASTDB is not manually corrected. Once again, only bases 5′ and 3′ of the subject sequence which are not matched/aligned with the query sequence are manually corrected for. No other manual corrections are to be made for the purposes of the present invention.

[0314] By a polypeptide having an amino acid sequence at least, for example, 95% “identical” to a query amino acid sequence of the present invention, it is intended that the amino acid sequence of the subject polypeptide is identical to the query sequence except that the subject polypeptide sequence may include up to five amino acid alterations per each 100 amino acids of the query amino acid sequence. In other words, to obtain a polypeptide having an amino acid sequence at least 95% identical to a query amino acid sequence, up to 5% of the amino acid residues in the subject sequence may be inserted, deleted, (indels) or substituted with another amino acid. These alterations of the reference sequence may occur at the amino or carboxy terminal positions of the reference amino acid sequence or anywhere between those terminal positions, interspersed either individually among residues in the reference sequence or in one or more contiguous groups within the reference sequence.

[0315] As a practical matter, whether any particular polypeptide is at least 80%, 85%, 90%, 95%, 96%, 97%, 98% or 99% identical to, for instance, the amino acid sequence of a polypeptide referred to in Table 1A (e.g., the amino acid sequence delineated in columns 12 and 15) or a fragment thereof, Table 1B (e.g., the amino acid sequence identified in column 6) or a fragment thereof, Table 2 (e.g., the amino acid sequence of the polypeptide encoded by the polynucleotide sequence defined in columns 8 and 9 of Table 2) or a fragment thereof, the amino acid sequence of the polypeptide encoded by the nucleotide sequence in SEQ ID NO:X or a fragment thereof, or the amino acid sequence of the polypeptide encoded by cDNA contained in ATCC Deposit No:Z, or a fragment thereof, the amino acid sequence of a mature (secreted) polypeptide encoded by cDNA contained in ATCC Deposit No:Z, or a fragment thereof, can be determined conventionally using known computer programs. A preferred method for determining the best overall match between a query sequence (a sequence of the present invention) and a subject sequence, also referred to as a global sequence alignment, can be determined using the FASTDB computer program based on the algorithm of Brutlag et al. (Comp. App. Biosci.6:237-245 (1990)). In a sequence alignment the query and subject sequences are either both nucleotide sequences or both amino acid sequences. The result of said global sequence alignment is expressed as percent identity. Preferred parameters used in a FASTDB amino acid alignment are: Matrix=PAM 0, k-tuple=2, Mismatch Penalty=1, Joining Penalty=20, Randomization Group Length=0, Cutoff Score=1, Window Size=sequence length, Gap Penalty=5, Gap Size Penalty=0.05, Window Size=500 or the length of the subject amino acid sequence, whichever is shorter.

[0316] If the subject sequence is shorter than the query sequence due to N— or C-terminal deletions, not because of internal deletions, a manual correction must be made to the results. This is because the FASTDB program does not account for N— and C-terminal truncations of the subject sequence when calculating global percent identity. For subject sequences truncated at the N— and C-termini, relative to the query sequence, the percent identity is corrected by calculating the number of residues of the query sequence that are N— and C-terminal of the subject sequence, which are not matched/aligned with a corresponding subject residue, as a percent of the total bases of the query sequence. Whether a residue is matched/aligned is determined by results of the FASTDB sequence alignment. This percentage is then subtracted from the percent identity, calculated by the above FASTDB program using the specified parameters, to arrive at a final percent identity score. This final percent identity score is what is used for the purposes of the present invention. Only residues to the N— and C-termini of the subject sequence, which are not matched/aligned with the query sequence, are considered for the purposes of manually adjusting the percent identity score. That is, only query residue positions outside the farthest N— and C- terminal residues of the subject sequence.

[0317] For example, a 90 amino acid residue subject sequence is aligned with a 100 residue query sequence to determine percent identity. The deletion occurs at the N-terminus of the subject sequence and therefore, the FASTDB alignment does not show a matching/alignment of the first 10 residues at the N-terminus. The 10 unpaired residues represent 10% of the sequence (number of residues at the N— and C-termini not matched/total number of residues in the query sequence) so 10% is subtracted from the percent identity score calculated by the FASTDB program. If the remaining 90 residues were perfectly matched the final percent identity would be 90%. In another example, a 90 residue subject sequence is compared with a 100 residue query sequence. This time the deletions are internal deletions so there are no residues at the N— or C-termini of the subject sequence which are not matched/aligned with the query. In this case the percent identity calculated by FASTDB is not manually corrected. Once again, only residue positions outside the N— and C-terminal ends of the subject sequence, as displayed in the FASTDB alignment, which are not matched/aligned with the query sequnce are manually corrected for. No other manual corrections are to made for the purposes of the present invention.

[0318] The polynucleotide variants of the invention may contain alterations in the coding regions, non-coding regions, or both. Especially preferred are polynucleotide variants containing alterations which produce silent substitutions, additions, or deletions, but do not alter the properties or activities of the encoded polypeptide. Nucleotide variants produced by silent substitutions due to the degeneracy of the genetic code are preferred. Moreover, polypeptide variants in which less than 50, less than 40, less than 30, less than 20, less than 10, or 5-50, 5-25, 5-10, 1-5, or 1-2 amino acids are substituted, deleted, or added in any combination are also preferred. Polynucleotide variants can be produced for a variety of reasons, e.g., to optimize codon expression for a particular host (change codons in the human mRNA to those preferred by a bacterial host such as E. coli).

[0319] Naturally occurring variants are called “allelic variants,” and refer to one of several alternate forms of a gene occupying a given locus on a chromosome of an organism. (Genes II, Lewin, B., ed., John Wiley & Sons, New York (1985)). These allelic variants can vary at either the polynucleotide and/or polypeptide level and are included in the present invention. Alternatively, non-naturally occurring variants may be produced by mutagenesis techniques or by direct synthesis.

[0320] Using known methods of protein engineering and recombinant DNA technology, variants may be generated to improve or alter the characteristics of the polypeptides of the present invention. For instance, one or more amino acids can be deleted from the N-terminus or C-terminus of the polypeptide of the present invention without substantial loss of biological function. As an example, Ron et al. (J. Biol. Chem. 268: 2984-2988 (1993)) reported variant KGF proteins having heparin binding activity even after deleting 3, 8, or 27 amino-terminal amino acid residues. Similarly, Interferon gamma exhibited up to ten times higher activity after deleting 8-10 amino acid residues from the carboxy terminus of this protein. (Dobeli et al., J. Biotechnology 7:199-216 (1988).)

[0321] Moreover, ample evidence demonstrates that variants often retain a biological activity similar to that of the naturally occurring protein. For example, Gayle and coworkers (J. Biol. Chem. 268:22105-22111 (1993)) conducted extensive mutational analysis of human cytokine IL-1a. They used random mutagenesis to generate over 3,500 individual IL-1a mutants that averaged 2.5 amino acid changes per variant over the entire length of the molecule. Multiple mutations were examined at every possible amino acid position. The investigators found that “[m]ost of the molecule could be altered with little effect on either [binding or biological activity].” In fact, only 23 unique amino acid sequences, out of more than 3,500 nucleotide sequences examined, produced a protein that significantly differed in activity from wild-type.

[0322] Furthermore, even if deleting one or more amino acids from the N-terminus or C-terminus of a polypeptide results in modification or loss of one or more biological functions, other biological activities may still be retained. For example, the ability of a deletion variant to induce and/or to bind antibodies which recognize the secreted form will likely be retained when less than the majority of the residues of the secreted form are removed from the N-terminus or C-terminus. Whether a particular polypeptide lacking N— or C-terminal residues of a protein retains such immunogenic activities can readily be determined by routine methods described herein and otherwise known in the art.

[0323] Thus, the invention further includes polypeptide variants which show a functional activity (e.g., biological activity) of the polypeptides of the invention. Such variants include deletions, insertions, inversions, repeats, and substitutions selected according to general rules known in the art so as have little effect on activity.

[0324] The present application is directed to nucleic acid molecules at least 80%, 85%, 90%, 95%, 96%, 97%, 98%, 99% or 100% identical to the nucleic acid sequences disclosed herein, (e.g., encoding a polypeptide having the amino acid sequence of an N and/or C terminal deletion), irrespective of whether they encode a polypeptide having functional activity. This is because even where a particular nucleic acid molecule does not encode a polypeptide having functional activity, one of skill in the art would still know how to use the nucleic acid molecule, for instance, as a hybridization probe or a polymerase chain reaction (PCR) primer. Uses of the nucleic acid molecules of the present invention that do not encode a polypeptide having functional activity include, inter alia, (1) isolating a gene or allelic or splice variants thereof in a cDNA library; (2) in situ hybridization (e.g., “FISH”) to metaphase chromosomal spreads to provide precise chromosomal location of the gene, as described in Verma et al., Human Chromosomes: A Manual of Basic Techniques, Pergamon Press, New York (1988); (3) Northern Blot analysis for detecting MRNA expression in specific tissues (e.g., normal or diseased tissues); and (4) in situ hybridization (e.g., histochemistry) for detecting MRNA expression in specific tissues (e.g., normal or diseased tissues).

[0325] Preferred, however, are nucleic acid molecules having sequences at least 80%, 85%, 90%, 95%, 96%, 97%, 98%, 99% or 100% identical to the nucleic acid sequences disclosed herein, which do, in fact, encode a polypeptide having functional activity. By a polypeptide having “functional activity” is meant, a polypeptide capable of displaying one or more known functional activities associated with a full-length (complete) protein and/or a mature (secreted) protein of the invention. Such functional activities include, but are not limited to, biological activity, antigenicity [ability to bind (or compete with a polypeptide of the invention for binding) to an anti-polypeptide of the invention antibody], immunogenicity (ability to generate antibody which binds to a specific polypeptide of the invention), ability to form multimers with polypeptides of the invention, and ability to bind to a receptor or ligand for a polypeptide of the invention.

[0326] The functional activity of the polypeptides, and fragments, variants and derivatives of the invention, can be assayed by various methods.

[0327] For example, in one embodiment where one is assaying for the ability to bind or compete with a full-length polypeptide of the present invention for binding to an anti-polypeptide antibody, various immunoassays known in the art can be used, including but not limited to, competitive and non-competitive assay systems using techniques such as radioimmunoassays, ELISA (enzyme linked immunosorbent assay), “sandwich” immunoassays, immunoradiometric assays, gel diffusion precipitation reactions, immunodiffusion assays, in situ immunoassays (using colloidal gold, enzyme or radioisotope labels, for example), western blots, precipitation reactions, agglutination assays (e.g., gel agglutination assays, hemagglutination assays), complement fixation assays, immunofluorescence assays, protein A assays, and immunoelectrophoresis assays, etc. In one embodiment, antibody binding is detected by detecting a label on the primary antibody. In another embodiment, the primary antibody is detected by detecting binding of a secondary antibody or reagent to the primary antibody. In a further embodiment, the secondary antibody is labeled. Many means are known in the art for detecting binding in an immunoassay and are within the scope of the present invention.

[0328] In another embodiment, where a ligand is identified, or the ability of a polypeptide fragment, variant or derivative of the invention to multimerize is being evaluated, binding can be assayed, e.g., by means well-known in the art, such as, for example, reducing and non-reducing gel chromatography, protein affinity chromatography, and affinity blotting. See generally, Phizicky et al., Microbiol. Rev. 59:94-123 (1995). In another embodiment, the ability of physiological correlates of a polypeptide of the present invention to bind to a substrate(s) of the polypeptide of the invention can be routinely assayed using techniques known in the art.

[0329] In addition, assays described herein (see Examples) and otherwise known in the art may routinely be applied to measure the ability of polypeptides of the present invention and fragments, variants and derivatives thereof to elicit polypeptide related biological activity (either in vitro or in vivo). Other methods will be known to the skilled artisan and are within the scope of the invention.

[0330] Of course, due to the degeneracy of the genetic code, one of ordinary skill in the art will immediately recognize that a large number of the nucleic acid molecules having a sequence at least 80%, 85%, 90%, 95%, 96%, 97%, 98%, 99%, or 100% identical to, for example, the nucleic acid sequence of the cDNA contained in ATCC Deposit No:Z, the nucleic acid sequence referred to in Table 1B (SEQ ID NO:X), the nucleic acid sequence disclosed in Table 1A (e.g., the nucleic acid sequence delineated in columns 7 and 8), the nucleic acid sequence disclosed in Table 2 (e.g., the nucleic acid sequence delineated in columns 8 and 9) or fragments thereof, will encode polypeptides “having functional activity.” In fact, since degenerate variants of any of these nucleotide sequences all encode the same polypeptide, in many instances, this will be clear to the skilled artisan even without performing the above described comparison assay. It will be further recognized in the art that, for such nucleic acid molecules that are not degenerate variants, a reasonable number will also encode a polypeptide having functional activity. This is because the skilled artisan is fully aware of amino acid substitutions that are either less likely or not likely to significantly effect protein function (e.g., replacing one aliphatic amino acid with a second aliphatic amino acid), as further described below.

[0331] For example, guidance concerning how to make phenotypically silent amino acid substitutions is provided in Bowie et al., “Deciphering the Message in Protein Sequences: Tolerance to Amino Acid Substitutions,” Science 247:1306-1310 (1990), wherein the authors indicate that there are two main strategies for studying the tolerance of an amino acid sequence to change.

[0332] The first strategy exploits the tolerance of amino acid substitutions by natural selection during the process of evolution. By comparing amino acid sequences in different species, conserved amino acids can be identified. These conserved amino acids are likely important for protein function. In contrast, the amino acid positions where substitutions have been tolerated by natural selection indicates that these positions are not critical for protein function. Thus, positions tolerating amino acid substitution could be modified while still maintaining biological activity of the protein.

[0333] The second strategy uses genetic engineering to introduce amino acid changes at specific positions of a cloned gene to identify regions critical for protein function. For example, site directed mutagenesis or alanine-scanning mutagenesis (introduction of single alanine mutations at every residue in the molecule) can be used. See Cunningham and Wells, Science 244:1081-1085 (1989). The resulting mutant molecules can then be tested for biological activity.

[0334] As the authors state, these two strategies have revealed that proteins are surprisingly tolerant of amino acid substitutions. The authors further indicate which amino acid changes are likely to be permissive at certain amino acid positions in the protein. For example, most buried (within the tertiary structure of the protein) amino acid residues require nonpolar side chains, whereas few features of surface side chains are generally conserved. Moreover, tolerated conservative amino acid substitutions involve replacement of the aliphatic or hydrophobic amino acids Ala, Val, Leu and Ile; replacement of the hydroxyl residues Ser and Thr; replacement of the acidic residues Asp and Glu; replacement of the amide residues Asn and Gln, replacement of the basic residues Lys, Arg, and His; replacement of the aromatic residues Phe, Tyr, and Trp, and replacement of the small-sized amino acids Ala, Ser, Thr, Met, and Gly.

[0335] Besides conservative amino acid substitution, variants of the present invention include (i) substitutions with one or more of the non-conserved amino acid residues, where the substituted amino acid residues may or may not be one encoded by the genetic code, or (ii) substitutions with one or more of the amino acid residues having a substituent group, or (iii) fusion of the mature polypeptide with another compound, such as a compound to increase the stability and/or solubility of the polypeptide (for example, polyethylene glycol), (iv) fusion of the polypeptide with additional amino acids, such as, for example, an IgG Fc fusion region peptide, serum albumin (preferably human serum albumin) or a fragment thereof, or leader or secretory sequence, or a sequence facilitating purification, or (v) fusion of the polypeptide with another compound, such as albumin (including but not limited to recombinant albumin (see, e.g., U.S. Pat. No. 5,876,969, issued Mar. 2, 1999, EP Patent 0 413 622, and U.S. Pat. No. 5,766,883, issued Jun. 16, 1998, herein incorporated by reference in their entirety)). Such variant polypeptides are deemed to be within the scope of those skilled in the art from the teachings herein.

[0336] For example, polypeptide variants containing amino acid substitutions of charged amino acids with other charged or neutral amino acids may produce proteins with improved characteristics, such as less aggregation. Aggregation of pharmaceutical formulations both reduces activity and increases clearance due to the aggregate's immunogenic activity. See Pinckard et al., Clin. Exp. Immunol. 2:331-340 (1967); Robbins et al., Diabetes 36: 838-845 (1987); Cleland et al., Crit. Rev. Therapeutic Drug Carrier Systems 10:307-377 (1993).

[0337] A further embodiment of the invention relates to polypeptides which comprise the amino acid sequence of a polypeptide having an amino acid sequence which contains at least one amino acid substitution, but not more than 50 amino acid substitutions, even more preferably, not more than 40 amino acid substitutions, still more preferably, not more than 30 amino acid substitutions, and still even more preferably, not more than 20 amino acid substitutions from a polypeptide sequence disclosed herein. Of course it is highly preferable for a polypeptide to have an amino acid sequence which, for example, comprises the amino acid sequence of a polypeptide of SEQ ID NO:Y, the amino acid sequence of the mature (e.g., secreted) polypeptide of SEQ ID NO:Y, an amino acid sequence encoded by SEQ ID NO:X, an amino acid sequence encoded by the portion of SEQ ID NO:X as defined in columnns 8 and 9 of Table 2, an amino acid sequence encoded by the complement of SEQ ID NO:X, an amino acid sequence encoded by cDNA contained in ATCC Deposit No:Z, and/or the amino acid sequence of a mature (secreted) polypeptide encoded by cDNA contained in ATCC Deposit No:Z, or a fragment thereof, which contains, in order of ever-increasing preference, at least one, but not more than 10, 9, 8, 7, 6, 5, 4, 3, 2 or 1 amino acid substitutions.

[0338] In specific embodiments, the polypeptides of the invention comprise, or alternatively, consist of, fragments or variants of a reference amino acid sequence selected from: (a) the amino acid sequence of SEQ ID NO:Y or fragments thereof (e.g., the mature formand/or other fragments described herein); (b) the amino acid sequence encoded by SEQ ID NO:X or fragments thereof; (c) the amino acid sequence encoded by the complement of SEQ ID NO:X or fragments thereof; (d) the amino acid sequence encoded by the portion of SEQ ID NO:X as defined in columns 8 and 9 of Table 2 or fragments thereof; and (e) the amino acid sequence encoded by cDNA contained in ATCC Deposit No:Z or fragments thereof; wherein the fragments or variants have 1-5, 5-10, 5-25, 5-50, 10-50 or 50-150, amino acid residue additions, substitutions, and/or deletions when compared to the reference amino acid sequence. In preferred embodiments, the amino acid substitutions are conservative. Polynucleotides encoding these polypeptides are also encompassed by the invention.

Polynucleotide and Polypeptide Fragments

[0339] The present invention is also directed to polynucleotide fragments of the polynucleotides (nucleic acids) of the invention. In the present invention, a “polynucleotide fragment” refers to a polynucleotide having a nucleic acid sequence which, for example: is a portion of the cDNA contained in ATCC Deposit No:Z or the complementary strand thereto; is a portion of the polynucleotide sequence encoding the polypeptide encoded by the cDNA contained in ATCC Deposit No:Z or the complementary strand thereto; is a portion of the polynucleotide sequence encoding the mature (secreted) polypeptide encoded by the cDNA contained in ATCC Deposit No:Z or the complementary strand thereto; is a portion of a polynucleotide sequence encoding the mature amino acid sequence as defined in columns 12 and 15 of Table 1A or the complementary strand thereto; is a portion of a polynucleotide sequence encoding the amino acid sequence encoded by the region of SEQ ID NO:X as defined in columns 8 and 9 of Table 2 or the complementary strand thereto; is a portion of the polynucleotide sequence of SEQ ID NO:X as defined in columns 8 and 9 of Table 2 or the complementary strand thereto; is a portion of the polynucleotide sequence in SEQ ID NO:X or the complementary strand thereto; is a polynucleotide sequence encoding a portion of the polypeptide of SEQ ID NO:Y; is a polynucleotide sequence encoding a portion of a polypeptide encoded by SEQ ID NO:X; or is a polynucleotide sequence encoding a portion of a polypeptide encoded by the complement of the polynucleotide sequence in SEQ ID NO:X.

[0340] The polynucleotide fragments of the invention are preferably at least about 15 nt, and more preferably at least about 20 nt, still more preferably at least about 30 nt, and even more preferably, at least about 40 nt, at least about 50 nt, at least about 75 nt, or at least about 150 nt in length. A fragment “at least 20 nt in length,” for example, is intended to include 20 or more contiguous bases from the cDNA sequence contained in ATCC Deposit No:Z, or the nucleotide sequence shown in SEQ ID NO:X or the complementary stand thereto. In this context “about” includes the particularly recited value or a value larger or smaller by several (5, 4, 3, 2, or 1) nucleotides, at either terminus or at both termini. These nucleotide fragments have uses that include, but are not limited to, as diagnostic probes and primers as discussed herein. Of course, larger fragments (e.g., at least 160, 170, 180, 190, 200, 250, 500, 600, 1000, or 2000 nucleotides in length ) are also encompassed by the invention.

[0341] Moreover, representative examples of polynucleotide fragments of the invention comprise, or alternatively consist of, a sequence from about nucleotide number 1-50, 51-100, 101-150, 151-200, 201-250, 251-300, 301-350, 351-400, 401-450, 451-500, 501-550, 551-600, 601-650, 651-700, 701-750, 751-800, 801-850, 851-900, 901-950, 951-1000, 1001-1050, 1051-1100, 1101-1150, 1151-1200, 1201-1250, 1251-1300, 1301-1350, 1351-1400, 1401-1450, 1451-1500, 1501-1550, 1551-1600, 1601-1650, 1651-1700, 1701-1750, 1751-1800, 1801-1850, 1851-1900, 1901-1950, 1951-2000, 2001-2050, 2051-2100, 2101-2150, 2151-2200, 2201-2250, 2251-2300, 2301-2350, 2351-2400, 2401-2450, 2451-2500, 2501-2550, 2551-2600, 2601-2650, 2651-2700, 2701-2750, 2751-2800, 2801-2850, 2851-2900, 2901-2950, 2951-3000, 3001-3050, 3051-3100, 3101-3150, 3151-3200, 3201-3250, 3251-3300, 3301-3350, 3351-3400, 3401-3450, 3451-3500, 3501-3550, 3551-3600, 3601-3650, 3651-3700, 3701-3750, 3751-3800, 3801-3850, 3851-3900, 3901-3950, 3951-4000, 4001-4050, 4051-4100, 4101-4150, 4151-4200, 4201-4250, 4251-4300, 4301-4350, 4351-4400, 4401-4450, 4451-4500, 4501-4550, 4551-4600, 4601-4650, 4651-4700, 4701-4750, 4751-4800, 4801-4850, 4851-4900, 4901-4950, 4951-5000, 5001-5050, 5051-5100, 5101-5150, 5151-5200, 5201-5250, 5251-5300, 5301-5350, 5351-5400, 5401-5450, 5451-5500, 5501-5550, 5551-5600, 5601-5650, 5651-5700, 5701-5750, 5751-5800, 5801-5850, 5851-5900, 5901-5950, 5951-6000, 6001-6050, 6051-6100, 6101-6150, 6151-6200, 6201-6250, 6251-6300, 6301-6350, 635t-6400, 6401-6450, 6451-6500, 6501-6550, 6551-6600, 6601-6650, 6651-6700, 6701-6750, 6751-6800, 6801-6850, 6851-6900, 6901-6950, 6951-7000, 7001-7050, 7051-7100, 7101-7150, 7151-7200, 7201-7250, 7251-7300 or 7301 to the end of SEQ ID NO:X, or the complementary strand thereto. In this context “about” includes the particularly recited range or a range larger or smaller by several (5, 4, 3, 2, or 1) nucleotides, at either terminus or at both termini. Preferably, these fragments encode a polypeptide which has a functional activity (e.g., biological activity). More preferably, these polynucleotides can be used as probes or primers as discussed herein. Polynucleotides which hybridize to one or more of these polynucleotides under stringent hybridization conditions or alternatively, under lower stringency conditions are also encompassed by the invention, as are polypeptides encoded by these polynucleotides.

[0342] Further representative examples of polynucleotide fragments of the invention comprise, or alternatively consist of, a sequence from about nucleotide number 1-50, 51-100, 101-150, 151-200, 201-250, 251-300, 301-350, 351-400, 401-450, 451-500, 501-550, 551-600, 601-650, 651-700, 701-750, 751-800, 801-850, 851-900, 901-950, 951-1000, 1001-1050, 1051-1100, 1101-1150, 1151-1200, 1201-1250, 1251-1300, 1301-1350, 1351-1400, 1401-1450, 1451-1500, 1501-1550, 1551-1600, 1601-1650, 1651-1700, 1701-1750, 1751-1800, 1801-1850, 1851-1900, 1901-1950, 1951-2000, 2001-2050, 2051-2100, 2101-2150, 2151-2200, 2201-2250, 2251-2300, 2301-2350, 2351-2400, 2401-2450, 2451-2500, 2501-2550, 2551-2600, 2601-2650, 2651-2700, 2701-2750, 2751-2800, 2801-2850, 2851-2900, 2901-2950, 2951-3000, 3001-3050, 3051-3100, 3101-3150, 3151-3200, 3201-3250, 3251-3300, 3301-3350, 3351-3400, 3401-3450, 3451-3500, 3501-3550, 3551-3600, 3601-3650, 3651-3700, 3701-3750, 3751-3800, 3801-3850, 3851-3900, 3901-3950, 3951-4000, 4001-4050, 4051-4100, 4101-4150, 4151-4200, 4201-4250, 4251-4300, 4301-4350, 4351-4400, 4401-4450, 4451-4500, 4501-4550, 4551-4600, 4601-4650, 4651-4700, 4701-4750, 4751-4800, 4801-4850, 4851-4900, 4901-4950, 4951-5000, 5001-5050, 5051-5100, 5101-5150, 5151-5200, 5201-5250, 5251-5300, 5301-5350, 5351-5400, 5401-5450, 5451-5500, 5501-5550, 5551-5600, 5601-5650, 5651-5700, 5701-5750, 5751-5800, 5801-5850, 5851-5900, 5901-5950, 5951-6000, 6001-6050, 6051-6100, 6101-6150, 6151-6200, 6201-6250, 6251-6300, 6301-6350, 6351-6400, 6401-6450, 6451-6500, 6501-6550, 6551-6600, 6601-6650, 6651-6700, 6701-6750, 6751-6800, 6801-6850, 6851-6900, 6901-6950, 6951-7000, 7001-7050, 7051-7100, 7101-7150, 7151-7200, 7201-7250, 7251-7300 or 7301 to the end of the cDNA sequence contained in ATCC Deposit No:Z, or the complementary strand thereto. In this context “about” includes the particularly recited range or a range larger or smaller by several (5, 4, 3, 2, or 1) nucleotides, at either terminus or at both termini. Preferably, these fragments encode a polypeptide which has a functional activity (e.g., biological activity). More preferably, these polynucleotides can be used as probes or primers as discussed herein. Polynucleotides which hybridize to one or more of these polynucleotides under stringent hybridization conditions or alternatively, under lower stringency conditions are also encompassed by the invention, as are polypeptides encoded by these polynucleotides.

[0343] In the present invention, a “polypeptide fragment” refers to an amino acid sequence which is a portion of the amino acid sequence contained in SEQ ID NO:Y, is a portion of the mature form of SEQ ID NO:Y as defined in columns 14 and 15 of Table 1A, a portion of an amino acid sequence encoded by the portion of SEQ ID NO:X as defined in columns 8 and 9 of Table 2, is a portion of an amino acid sequence encoded by the polynucleotide sequence of SEQ ID NO:X, is a portion of an amino acid sequence encoded by the complement of the polynucleotide sequence in SEQ ID NO:X, is a portion of the amino acid sequence of a mature (secreted) polypeptide encoded by the cDNA contained in ATCC Deposit No:Z, and/or is a portion of an amino acid sequence encoded by the cDNA contained in ATCC Deposit No:Z. Protein (polypeptide) fragments may be “free-standing,” or comprised within a larger polypeptide of which the fragment forms a part or region, most preferably as a single continuous region. Representative examples of polypeptide fragments of the invention, include, for example, fragments comprising, or alternatively consisting of, from about amino acid number 1-20, 21-40, 41-60, 61-80, 81-100, 101-120, 121-140, 141-160, 161-180, 181-200, 201-220, 221-240, 241-260, 261-280, 281-300, 301-320, 321-340, 341-360, 361-380, 381-400, 401-420, 421-440, 441-460, 461-480, 481-500, 501-520, 521-540, 541-560, 561-580, 581-600, 601-620, 621-640, 641-660, 661-680, 681-700, 701-720, 721-740, 741-760, 761-780, 781-800, 801-820, 821-840, 841-860, 861-880, 881-900, 901-920, 921-940, 941-960, 961-980, 981-1000, 1001-1020, 1021-1040, 1041-1060, 1061-1080, 1081-1100, 1101-1120, 1121-1140, 1141-1160, 1161-1180, 1181-1200, 1201-1220, 1221-1240, 1241-1260, 1261-1280, 1281-1300, 1301-1320, 1321-1340, 1341-1360, 1361-1380, 1381-1400, 1401-1420, 1421-1440, or 1441 to the end of the coding region of cDNA and SEQ ID NO: Y. In a preferred embodiment, polypeptide fragments of the invention include, for example, fragments comprising, or alternatively consisting of, from about amino acid number 1-20, 21-40, 41-60, 61-80, 81-100, 101-120, 121-140, 141-160, 161-180, 181-200, 201-220, 221-240, 241-260, 261-280, 281-300, 301-320, 321-340, 341-360, 361-380, 381-400, 401-420, 421-440, 441-460, 461-480, 481-500, 501-520, 521-540, 541-560, 561-580, 581-600, 601-620, 621-640, 641-660, 661-680, 681-700, 701-720, 721-740, 741-760, 761-780, 781-800, 801-820, 821-840, 841-860, 861-880, 881-900, 901-920, 921-940, 941-960, 961-980, 981-1000, 1001-1020, 1021-1040, 1041-1060, 1061-1080, 1081-1100, 1101-1120, 1121-1140, 1141-1160, 1161-1180, 1181-1200, 1201-1220, 1221-1240, 1241-1260, 1261-1280, 1281-1300, 1301-1320, 1321-1340, 1341-1360, 1361-1380, 1381-1400, 1401-1420, 1421-1440, or 1441 to the end of the coding region of SEQ ID NO:Y. Moreover, polypeptide fragments of the invention may be at least about 10, 15, 20, 25, 30, 35, 40, 45, 50, 55, 60, 65, 70, 75, 80, 85, 90, 100, 110, 120, 130, 140, or 150 amino acids in length. In this context “about” includes the particularly recited ranges or values, or ranges or values larger or smaller by several (5, 4, 3, 2, or 1) amino acids, at either extreme or at both extremes. Polynucleotides encoding these polypeptide fragments are also encompassed by the invention.

[0344] Even if deletion of one or more amino acids from the N-terminus of a protein results in modification of loss of one or more biological functions of the protein, other functional activities (e.g., biological activities, ability to multimerize, ability to bind a ligand) may still be retained. For example, the ability of shortened muteins to induce and/or bind to antibodies which recognize the complete or mature forms of the polypeptides generally will be retained when less than the majority of the residues of the complete or mature polypeptide are removed from the N-terminus. Whether a particular polypeptide lacking N-terminal residues of a complete polypeptide retains such immunologic activities can readily be determined by routine methods described herein and otherwise known in the art. It is not unlikely that a mutein with a large number of deleted N-terminal amino acid residues may retain some biological or immunogenic activities. In fact, peptides composed of as few as six amino acid residues may often evoke an immune response.

[0345] Accordingly, polypeptide fragments include the secreted protein as well as the mature form. Further preferred polypeptide fragments include the secreted protein or the mature form having a continuous series of deleted residues from the amino or the carboxy terminus, or both. For example, any number of amino acids, ranging from 1-60, can be deleted from the amino terminus of either the secreted polypeptide or the mature form. Similarly, any number of amino acids, ranging from 1-30, can be deleted from the carboxy terminus of the secreted protein or mature form. Furthermore, any combination of the above amino and carboxy terminus deletions are preferred. Similarly, polynucleotides encoding these polypeptide fragments are also preferred.

[0346] The present invention further provides polypeptides having one or more residues deleted from the amino terminus of the amino acid sequence of a polypeptide disclosed herein (e.g., a polypeptide of SEQ ID NO:Y, a polypeptide as defined in columns 12 and 15 of Table 1A, a polypeptide encoded by the polynucleotide sequence contained in SEQ ID NO:X or the complement thereof, a polypeptide encoded by the portion of SEQ ID NO:X as defined in columns 8 and 9 of Table 2, a polypeptide encoded by the cDNA contained in ATCC Deposit No:Z, and/or a mature polypeptide encoded by the cDNA contained in ATCC Deposit No:Z). In particular, N-terminal deletions may be described by the general formula m-q, where q is a whole integer representing the total number of amino acid residues in a polypeptide of the invention (e.g., the polypeptide disclosed in SEQ ID NO:Y, the mature (secreted) portion of SEQ ID NO:Y as defined in columns 14 and 15 of Table 1A, or the polypeptide encoded by the portion of SEQ ID NO:X as defined in columns 8 and 9 of Table 2), and m is defined as any integer ranging from 2 to q-6. Polynucleotides encoding these polypeptides are also encompassed by the invention.

[0347] The present invention further provides polypeptides having one or more residues from the carboxy terminus of the amino acid sequence of a polypeptide disclosed herein (e.g., a polypeptide of SEQ ID NO:Y, the mature (secreted) portion of SEQ ID NO:Y as defined in columns 14 and 15 of Table 1A, a polypeptide encoded by the polynucleotide sequence contained in SEQ ID NO:X, a polypeptide encoded by the portion of SEQ ID NO:X as defined in columns 8 and 9 of Table 2, a polypeptide encoded by the cDNA contained in ATCC Deposit No:Z, and/or a mature polypeptide encoded by the cDNA contained in ATCC Deposit No:Z). In particular, C-terminal deletions may be described by the general formula 1-n, where n is any whole integer ranging from 6 to q-1, and where n corresponds to the position of amino acid residue in a polypeptide of the invention. Polynucleotides encoding these polypeptides are also encompassed by the invention.

[0348] In addition, any of the above described N— or C-terminal deletions can be combined to produce a N— and C-terminal deleted polypeptide. The invention also provides polypeptides having one or more amino acids deleted from both the amino and the carboxyl termini, which may be described generally as having residues m-n of a polypeptide encoded by SEQ ID NO:X (e.g., including, but not limited to, the preferred polypeptide disclosed as SEQ ID NO:Y, the mature (secreted) portion of SEQ ID NO:Y as defined in columns 14 and 15 of Table 1A, and the polypeptide encoded by the portion of SEQ ID NO:X as defined in columns 8 and 9 of Table 2), the cDNA contained in ATCC Deposit No:Z, and/or the complement thereof, where n and m are integers as described above. Polynucleotides encoding these polypeptides are also encompassed by the invention.

[0349] Also as mentioned above, even if deletion of one or more amino acids from the C-terminus of a protein results in modification of loss of one or more biological functions of the protein, other functional activities (e.g., biological activities, ability to multimerize, ability to bind a ligand) may still be retained. For example the ability of the shortened mutein to induce and/or bind to antibodies which recognize the complete or mature forms of the polypeptide generally will be retained when less than the majority of the residues of the complete or mature polypeptide are removed from the C-terminus. Whether a particular polypeptide lacking C-terminal residues of a complete polypeptide retains such immunologic activities can readily be determined by routine methods described herein and otherwise known in the art. It is not unlikely that a mutein with a large number of deleted C-terminal amino acid residues may retain some biological or immunogenic activities. In fact, peptides composed of as few as six amino acid residues may often evoke an immune response.

[0350] The present application is also directed to proteins containing polypeptides at least 80%, 85%, 90%, 95%, 96%, 97%, 98% or 99% identical to a polypeptide sequence set forth herein. In preferred embodiments, the application is directed to proteins containing polypeptides at least 80%, 85%, 90%, 95%, 96%, 97%, 98% or 99% identical to polypeptides having the amino acid sequence of the specific N— and C-terminal deletions. Polynucleotides encoding these polypeptides are also encompassed by the invention.

[0351] Any polypeptide sequence encoded by, for example, the polynucleotide sequences set forth as SEQ ID NO:X or the complement thereof, (presented, for example, in Tables 1A and 2), or the cDNA contained in ATCC Deposit No:Z, may be analyzed to determine certain preferred regions of the polypeptide. For example, the amino acid sequence of a polypeptide encoded by a polynucleotide sequence of SEQ ID NO:X (e.g., the polypeptide of SEQ ID NO:Y and the polypeptide encoded by the portion of SEQ ID NO:X as defined in columnns 8 and 9 of Table 2) or the cDNA contained in ATCC Deposit No:Z may be analyzed using the default parameters of the DNASTAR computer algorithm (DNASTAR, Inc., 1228 S. Park St., Madison, Wis. 53715 USA; http://www.dnastar.com/).

[0352] Polypeptide regions that may be routinely obtained using the DNASTAR computer algorithm include, but are not limited to, Gamier-Robson alpha-regions, beta-regions, turn-regions, and coil-regions; Chou-Fasman alpha-regions, beta-regions, and turn-regions; Kyte-Doolittle hydrophilic regions and hydrophobic regions; Eisenberg alpha- and beta-amphipathic regions; Karplus-Schulz flexible regions; Emini surface-forming regions; and Jameson-Wolf regions of high antigenic index. Among highly preferred polynucleotides of the invention in this regard are those that encode polypeptides comprising regions that combine several structural features, such as several (e.g., 1, 2, 3 or 4) of the features set out above.

[0353] Additionally, Kyte-Doolittle hydrophilic regions and hydrophobic regions, Emini surface-forming regions, and Jameson-Wolf regions of high antigenic index (i.e., containing four or more contiguous amino acids having an antigenic index of greater than or equal to 1.5, as identified using the default parameters of the Jameson-Wolf program) can routinely be used to determine polypeptide regions that exhibit a high degree of potential for antigenicity. Regions of high antigenicity are determined from data by DNASTAR analysis by choosing values which represent regions of the polypeptide which are likely to be exposed on the surface of the polypeptide in an environment in which antigen recognition may occur in the process of initiation of an immune response.

[0354] Preferred polypeptide fragments of the invention are fragments comprising, or alternatively, consisting of, an amino acid sequence that displays a functional activity (e.g. biological activity) of the polypeptide sequence of which the amino acid sequence is a fragment. By a polypeptide displaying a “functional activity” is meant a polypeptide capable of one or more known functional activities associated with a full-length protein, such as, for example, biological activity, antigenicity, immunogenicity, and/or multimerization, as described herein.

[0355] Other preferred polypeptide fragments are biologically active fragments. Biologically active fragments are those exhibiting activity similar, but not necessarily identical, to an activity of the polypeptide of the present invention. The biological activity of the fragments may include an improved desired activity, or a decreased undesirable activity.

[0356] In preferred embodiments, polypeptides of the invention comprise, or alternatively consist of, one, two, three, four, five or more of the antigenic fragments of the polypeptide of SEQ ID NO:Y, or portions thereof. Polynucleotides encoding these polypeptides are also encompassed by the invention.

Epitopes and Antibodies

[0357] The present invention encompasses polypeptides comprising, or alternatively consisting of, an epitope of: the polypeptide sequence shown in SEQ ID NO:Y; a polypeptide sequence encoded by SEQ ID NO:X or the complementary strand thereto; the polypeptide sequence encoded by the portion of SEQ ID NO:X as defined in columns 8 and 9 of Table 2; the polypeptide sequence encoded by the cDNA contained in ATCC Deposit No:Z; or the polypeptide sequence encoded by a polynucleotide that hybridizes to the sequence of SEQ ID NO:X, the complement of the sequence of SEQ ID NO:X, the complement of a portion of SEQ ID NO:X as defined in columns 8 and 9 of Table 2, or the cDNA sequence contained in ATCC Deposit No:Z under stringent hybridization conditions or alternatively, under lower stringency hybridization as defined supra. The present invention further encompasses polynucleotide sequences encoding an epitope of a polypeptide sequence of the invention (such as, for example, the sequence disclosed in SEQ ID NO:X, or a fragment thereof), polynucleotide sequences of the complementary strand of a polynucleotide sequence encoding an epitope of the invention, and polynucleotide sequences which hybridize to the complementary strand under stringent hybridization conditions or alternatively, under lower stringency hybridization conditions defined supra.

[0358] The term “epitopes,” as used herein, refers to portions of a polypeptide having antigenic or immunogenic activity in an animal, preferably a mammal, and most preferably in a human. In a preferred embodiment, the present invention encompasses a polypeptide comprising an epitope, as well as the polynucleotide encoding this polypeptide. An “immunogenic epitope,” as used herein, is defined as a portion of a protein that elicits an antibody response in an animal, as determined by any method known in the art, for example, by the methods for generating antibodies described infra. (See, for example, Geysen et al., Proc. Natl. Acad. Sci. USA 81:3998-4002 (1983)). The term “antigenic epitope,” as used herein, is defined as a portion of a protein to which an antibody can immunospecifically bind its antigen as determined by any method well known in the art, for example, by the immunoassays described herein. Immunospecific binding excludes non-specific binding but does not necessarily exclude cross- reactivity with other antigens. Antigenic epitopes need not necessarily be immunogenic.

[0359] Fragments which function as epitopes may be produced by any conventional means. (See, e.g., Houghten, R. A., Proc. Natl. Acad. Sci. USA 82:5131-5135 (1985) further described in U.S. Pat. No. 4,631,211.)

[0360] In the present invention, antigenic epitopes preferably contain a sequence of at least 4, at least 5, at least 6, at least 7, more preferably at least 8, at least 9, at least 10, at least 11, at least 12, at least 13, at least 14, at least 15, at least 20, at least 25, at least 30, at least 40, at least 50, and, most preferably, between about 15 to about 30 amino acids. Preferred polypeptides comprising immunogenic or antigenic epitopes are at least 10, 15, 20, 25, 30, 35, 40, 45, 50, 55, 60, 65, 70, 75, 80, 85, 90, 95, or 100 amino acid residues in length. Additional non-exclusive preferred antigenic epitopes include the antigenic epitopes disclosed herein, as well as portions thereof. Antigenic epitopes are useful, for example, to raise antibodies, including monoclonal antibodies, that specifically bind the epitope. Preferred antigenic epitopes include the antigenic epitopes disclosed herein, as well as any combination of two, three, four, five or more of these antigenic epitopes. Antigenic epitopes can be used as the target molecules in immunoassays. (See, for instance, Wilson et al., Cell 37:767-778 (1984); Sutcliffe et al., Science 219:660-666 (1983)).

[0361] Non-limiting examples of epitopes of polypeptides that can be used to generate antibodies of the invention include a polypeptide comprising, or alternatively consisting of, at least one, two, three, four, five, six or more of the portion(s) of SEQ ID NO:Y specified in column 6 of Table 1B. These polypeptide fragments have been determined to bear antigenic epitopes of the proteins of the invention by the analysis of the Jameson-Wolf antigenic index which is included in the DNAStar suite of computer programs. By “comprise” it is intended that a polypeptide contains at least one, two, three, four, five, six or more of the portion(s) of SEQ ID NO:Y shown in column 6 of Table 1B, but it may contain additional flanking residues on either the amino or carboxyl termini of the recited portion. Such additional flanking sequences are preferably sequences naturally found adjacent to the portion; i.e., contiguous sequence shown in SEQ ID NO:Y. The flanking sequence may, however, be sequences from a heterolgous polypeptide, such as from another protein described herein or from a heterologous polypeptide not described herein. In particular embodiments, epitope portions of a polypeptide of the invention comprise one, two, three, or more of the portions of SEQ ID NO:Y shown in column 6 of Table 1B.

[0362] Similarly, immunogenic epitopes can be used, for example, to induce antibodies according to methods well known in the art. See, for instance, Sutcliffe et al., supra; Wilson et al., supra; Chow et al., Proc. Natl. Acad. Sci. USA 82:910-914; and Bittle et al., J. Gen. Virol. 66:2347-2354 (1985). Preferred immunogenic epitopes include the immunogenic epitopes disclosed herein, as well as any combination of two, three, four, five or more of these immunogenic epitopes. The polypeptides comprising one or more immunogenic epitopes may be presented for eliciting an antibody response together with a carrier protein, such as an albumin, to an animal system (such as rabbit or mouse), or, if the polypeptide is of sufficient length (at least about 25 amino acids), the polypeptide may be presented without a carrier. However, immunogenic epitopes comprising as few as 8 to 10 amino acids have been shown to be sufficient to raise antibodies capable of binding to, at the very least, linear epitopes in a denatured polypeptide (e.g., in Western blotting).

[0363] Epitope-bearing polypeptides of the present invention may be used to induce antibodies according to methods well known in the art including, but not limited to, in vivo immunization, in vitro immunization, and phage display methods. See, e.g., Sutcliffe et al., supra; Wilson et al., supra, and Bittle et al., J. Gen. Virol., 66:2347-2354 (1985). If in vivo immunization is used, animals may be immunized with free peptide; however, anti-peptide antibody titer may be boosted by coupling the peptide to a macromolecular carrier, such as keyhole limpet hemacyanin (KLH) or tetanus toxoid. For instance, peptides containing cysteine residues may be coupled to a carrier using a linker such as maleimidobenzoyl-N-hydroxysuccinimide ester (MBS), while other peptides may be coupled to carriers using a more general linking agent such as glutaraldehyde. Animals such as rabbits, rats and mice are immunized with either free or carrier-coupled peptides, for instance, by intraperitoneal and/or intradermal injection of emulsions containing about 100 μg of peptide or carrier protein and Freund's adjuvant or any other adjuvant known for stimulating an immune response. Several booster injections may be needed, for instance, at intervals of about two weeks, to provide a useful titer of anti-peptide antibody which can be detected, for example, by ELISA assay using free peptide adsorbed to a solid surface. The titer of anti-peptide antibodies in serum from an immunized animal may be increased by selection of anti-peptide antibodies, for instance, by adsorption to the peptide on a solid support and elution of the selected antibodies according to methods well known in the art.

[0364] As one of skill in the art will appreciate, and as discussed above, the polypeptides of the present invention (e.g., those comprising an immunogenic or antigenic epitope) can be fused to heterologous polypeptide sequences. For example, polypeptides of the present invention (including fragments or variants thereof), may be fused with the constant domain of immunoglobulins (IgA, IgE, IgG, IgM), or portions thereof (CH1, CH2, CH3, or any combination thereof and portions thereof, resulting in chimeric polypeptides. By way of another non-limiting example, polypeptides and/or antibodies of the present invention (including fragments or variants thereof) may be fused with albumin (including but not limited to recombinant human serum albumin or fragments or variants thereof (see, e.g., U.S. Pat. No. 5,876,969, issued Mar. 2, 1999, EP Patent 0 413 622, and U.S. Pat. No. 5,766,883, issued Jun. 16, 1998, herein incorporated by reference in their entirety)). In a preferred embodiment, polypeptides and/or antibodies of the present invention (including fragments or variants thereof) are fused with the mature form of human serum albumin (i.e., amino acids 1-585 of human serum albumin as shown in FIGS. 1 and 2 of EP Patent 0 322 094) which is herein incorporated by reference in its entirety. In another preferred embodiment, polypeptides and/or antibodies of the present invention (including fragments or variants thereof) are fused with polypeptide fragments comprising, or alternatively consisting of, amino acid residues 1-z of human serum albumin, where z is an integer from 369 to 419, as described in U.S. Pat. No. 5,766,883 herein incorporated by reference in its entirety. Polypeptides and/or antibodies of the present invention (including fragments or variants thereof) may be fused to either the N— or C-terminal end of the heterologous protein (e.g., immunoglobulin Fc polypeptide or human serum albumin polypeptide). Polynucleotides encoding fusion proteins of the invention are also encompassed by the invention.

[0365] Such fusion proteins as those described above may facilitate purification and may increase half-life in vivo. This has been shown for chimeric proteins consisting of the first two domains of the human CD4-polypeptide and various domains of the constant regions of the heavy or light chains of mammalian immunoglobulins. See, e.g., EP 394,827; Traunecker et al., Nature, 331:84-86 (1988). Enhanced delivery of an antigen across the epithelial barrier to the immune system has been demonstrated for antigens (e.g., insulin) conjugated to an FcRn binding partner such as IgG or Fc fragments (see, e.g., PCT Publications WO 96/22024 and WO 99/04813). IgG fusion proteins that have a disulfide-linked dimeric structure due to the IgG portion desulfide bonds have also been found to be more efficient in binding and neutralizing other molecules than monomeric polypeptides or fragments thereof alone. See, e.g., Fountoulakis et al., J. Biochem., 270:3958-3964 (1995). Nucleic acids encoding the above epitopes can also be recombined with a gene of interest as an epitope tag (e.g., the hemagglutinin (HA) tag or flag tag) to aid in detection and purification of the expressed polypeptide. For example, a system described by Janknecht et al. allows for the ready purification of non-denatured fusion proteins expressed in human cell lines (Janknecht et al., 1991, Proc. Natl. Acad. Sci. USA 88:8972-897). In this system, the gene of interest is subcloned into a vaccinia recombination plasmid such that the open reading frame of the gene is translationally fused to an amino-terminal tag consisting of six histidine residues. The tag serves as a matrix binding domain for the fusion protein. Extracts from cells infected with the recombinant vaccinia virus are loaded onto Ni2+ nitriloacetic acid-agarose column and histidine-tagged proteins can be selectively eluted with imidazole-containing buffers.

Fusion Proteins

[0366] Any polypeptide of the present invention can be used to generate fusion proteins. For example, the polypeptide of the present invention, when fused to a second protein, can be used as an antigenic tag. Antibodies raised against the polypeptide of the present invention can be used to indirectly detect the second protein by binding to the polypeptide. Moreover, because secreted proteins target cellular locations based on trafficking signals, polypeptides of the present invention which are shown to be secreted can be used as targeting molecules once fused to other proteins.

[0367] Examples of domains that can be fused to polypeptides of the present invention include not only heterologous signal sequences, but also other heterologous functional regions. The fusion does not necessarily need to be direct, but may occur through linker sequences.

[0368] In certain preferred embodiments, proteins of the invention are fusion proteins comprising an amino acid sequence that is an N and/or C-terminal deletion of a polypeptide of the invention. In preferred embodiments, the invention is directed to a fusion protein comprising an amino acid sequence that is at least 90%, 95%, 96%, 97%, 98% or 99% identical to a polypeptide sequence of the invention. Polynucleotides encoding these proteins are also encompassed by the invention.

[0369] Moreover, fusion proteins may also be engineered to improve characteristics of the polypeptide of the present invention. For instance, a region of additional amino acids, particularly charged amino acids, may be added to the N-terminus of the polypeptide to improve stability and persistence during purification from the host cell or subsequent handling and storage. Also, peptide moieties may be added to the polypeptide to facilitate purification. Such regions may be removed prior to final preparation of the polypeptide. The addition of peptide moieties to facilitate handling of polypeptides are familiar and routine techniques in the art.

[0370] As one of skill in the art will appreciate that, as discussed above, polypeptides of the present invention, and epitope-bearing fragments thereof, can be combined with heterologous polypeptide sequences. For example, the polypeptides of the present invention may be fused with heterologous polypeptide sequences, for example, the polypeptides of the present invention may be fused with the constant domain of immunoglobulins (IgA, IgE, IgG, IgM) or portions thereof (CH1, CH2, CH3, and any combination thereof, including both entire domains and portions thereof), or albumin (including, but not limited to, native or recombinant human albumin or fragments or variants thereof (see, e.g., U.S. Pat. No. 5,876,969, issued Mar. 2, 1999, EP Patent 0 413 622, and U.S. Pat. No. 5,766,883, issued Jun. 16, 1998, herein incorporated by reference in their entirety)), resulting in chimeric polypeptides. For example, EP-A-O 464 533 (Canadian counterpart 2045869) discloses fusion proteins comprising various portions of constant region of immunoglobulin molecules together with another human protein or part thereof. In many cases, the Fc part in a fusion protein is beneficial in therapy and diagnosis, and thus can result in, for example, improved pharmacokinetic properties (EP-A 0232 262). Alternatively, deleting the Fc part after the fusion protein has been expressed, detected, and purified, would be desired. For example, the Fc portion may hinder therapy and diagnosis if the fusion protein is used as an antigen for immunizations. In drug discovery, for example, human proteins, such as hIL-5, have been fused with Fc portions for the purpose of high-throughput screening assays to identify antagonists of hIL-5. See, D. Bennett et al., J. Molecular Recognition 8:52-58 (1995); K. Johanson et al., J. Biol. Chem. 270:9459-9471 (1995).

[0371] Moreover, the polypeptides of the present invention can be fused to marker sequences, such as a polypeptide which facilitates purification of the fused polypeptide. In preferred embodiments, the marker amino acid sequence is a hexa-histidine peptide, such as the tag provided in a pQE vector (QIAGEN, Inc., 9259 Eton Avenue, Chatsworth, Calif., 91311), among others, many of which are commercially available. As described in Gentz et al., Proc. Natl. Acad. Sci. USA 86:821-824 (1989), for instance, hexa-histidine provides for convenient purification of the fusion protein. Another peptide tag useful for purification, the “HA” tag, corresponds to an epitope derived from the influenza hemagglutinin protein (Wilson et al., Cell 37:767 (1984)).

[0372] Additional fusion proteins of the invention may be generated through the techniques of gene-shuffling, motif-shuffling, exon-shuffling, and/or codon-shuffling (collectively referred to as “DNA shuffling”). DNA shuffling may be employed to modulate the activities of polypeptides of the invention, such methods can be used to generate polypeptides with altered activity, as well as agonists and antagonists of the polypeptides. See, generally, U.S. Pat. Nos. 5,605,793; 5,811,238; 5,830,721; 5,834,252; and 5,837,458, and Patten et al., Curr. Opinion Biotechnol. 8:724-33 (1997); Harayama, Trends Biotechnol. 16(2):76-82 (1998); Hansson, et al., J. Mol. Biol. 287:265-76 (1999); and Lorenzo and Blasco, Biotechniques 24(2):308-13 (1998) (each of these patents and publications are hereby incorporated by reference in its entirety). In one embodiment, alteration of polynucleotides corresponding to SEQ ID NO:X and the polypeptides encoded by these polynucleotides may be achieved by DNA shuffling. DNA shuffling involves the assembly of two or more DNA segments by homologous or site-specific recombination to generate variation in the polynucleotide sequence. In another embodiment, polynucleotides of the invention, or the encoded polypeptides, may be altered by being subjected to random mutagenesis by error-prone PCR, random nucleotide insertion or other methods prior to recombination. In another embodiment, one or more components, motifs, sections, parts, domains, fragments, etc., of a polynucleotide encoding a polypeptide of the invention may be recombined with one or more components, motifs, sections, parts, domains, fragments, etc. of one or more heterologous molecules.

[0373] Thus, any of these above fusions can be engineered using the polynucleotides or the polypeptides of the present invention.

Recombinant and Synthetic Production of Polypeptides of the Invention

[0374] The present invention also relates to vectors containing the polynucleotide of the present invention, host cells, and the production of polypeptides by synthetic and recombinant techniques. The vector may be, for example, a phage, plasmid, viral, or retroviral vector. Retroviral vectors may be replication competent or replication defective. In the latter case, viral propagation generally will occur only in complementing host cells.

[0375] The polynucleotides of the invention may be joined to a vector containing a selectable marker for propagation in a host. Generally, a plasmid vector is introduced in a precipitate, such as a calcium phosphate precipitate, or in a complex with a charged lipid. If the vector is a virus, it may be packaged in vitro using an appropriate packaging cell line and then transduced into host cells.

[0376] The polynucleotide insert should be operatively linked to an appropriate promoter, such as the phage lambda PL promoter, the E. coli lac, trp, phoA and tac promoters, the SV40 early and late promoters and promoters of retroviral LTRs, to name a few. Other suitable promoters will be known to the skilled artisan. The expression constructs will further contain sites for transcription initiation, termination, and, in the transcribed region, a ribosome binding site for translation. The coding portion of the transcripts expressed by the constructs will preferably include a translation initiating codon at the beginning and a termination codon (UAA, UGA or UAG) appropriately positioned at the end of the polypeptide to be translated.

[0377] As indicated, the expression vectors will preferably include at least one selectable marker. Such markers include dihydrofolate reductase, G418, glutamine synthase, or neomycin resistance for eukaryotic cell culture, and tetracycline, kanamycin or ampicillin resistance genes for culturing in E. coli and other bacteria. Representative examples of appropriate hosts include, but are not limited to, bacterial cells, such as E. coli, Streptomyces and Salmonella typhimurium cells; fungal cells, such as yeast cells (e.g., Saccharomyces cerevisiae or Pichia pastoris (ATCC Accession No. 201178)); insect cells such as Drosophila S2 and Spodoptera Sf9 cells; animal cells such as CHO, COS, 293, and Bowes melanoma cells; and plant cells. Appropriate culture mediums and conditions for the above-described host cells are known in the art.

[0378] Among vectors preferred for use in bacteria include pQE70, pQE60 and pQE-9, available from QIAGEN, Inc.; pBluescript vectors, Phagescript vectors, pNH8A, pNH16a, pNH18A, pNH46A, available from Stratagene Cloning Systems, Inc.; and ptrc99a, pKK223-3, pKK233-3, pDR540, pRIT5 available from Pharmacia Biotech, Inc. Among preferred eukaryotic vectors are pWLNEO, pSV2CAT, pOG44, pXT1 and pSG available from Stratagene; and pSVK3, pBPV, pMSG and pSVL available from Pharmacia. Preferred expression vectors for use in yeast systems include, but are not limited to pYES2, pYD1, pTEF1/Zeo, pYES2/GS, pPICZ, pGAPZ, pGAPZalph, pPIC9, pPIC3.5, pHIL-D2, pHIL-S1, pPIC3.5K, pPIC9K, and PAO815 (all available from Invitrogen, Carlbad, Calif.). Other suitable vectors will be readily apparent to the skilled artisan.

[0379] Vectors which use glutamine synthase (GS) or DHFR as the selectable markers can be amplified in the presence of the drugs methionine sulphoximine or methotrexate, respectively. An advantage of glutamine synthase based vectors are the availabilty of cell lines (e.g., the murine myeloma cell line, NSO) which are glutamine synthase negative. Glutamine synthase expression systems can also function in glutamine synthase expressing cells (e.g., Chinese Hamster Ovary (CHO) cells) by providing additional inhibitor to prevent the functioning of the endogenous gene. A glutamine synthase expression system and components thereof are detailed in PCT publications: WO87/04462; WO86/05807; WO89/01036; WO89/10404; and WO91/06657, which are hereby incorporated in their entireties by reference herein. Additionally, glutamine synthase expression vectors can be obtained from Lonza Biologics, Inc. (Portsmouth, N.H.). Expression and production of monoclonal antibodies using a GS expression system in murine myeloma cells is described in Bebbington et al., Bio/technology 10:169(1992) and in Biblia and Robinson Biotechnol. Prog. 11:1 (1995) which are herein incorporated by reference.

[0380] The present invention also relates to host cells containing the above-described vector constructs described herein, and additionally encompasses host cells containing nucleotide sequences of the invention that are operably associated with one or more heterologous control regions (e.g., promoter and/or enhancer) using techniques known of in the art. The host cell can be a higher eukaryotic cell, such as a mammalian cell (e.g., a human derived cell), or a lower eukaryotic cell, such as a yeast cell, or the host cell can be a prokaryotic cell, such as a bacterial cell. A host strain may be chosen which modulates the expression of the inserted gene sequences, or modifies and processes the gene product in the specific fashion desired. Expression from certain promoters can be elevated in the presence of certain inducers; thus expression of the genetically engineered polypeptide may be controlled. Furthermore, different host cells have characteristics and specific mechanisms for the translational and post-translational processing and modification (e.g., phosphorylation, cleavage) of proteins. Appropriate cell lines can be chosen to ensure the desired modifications and processing of the foreign protein expressed.

[0381] Introduction of the nucleic acids and nucleic acid constructs of the invention into the host cell can be effected by calcium phosphate transfection, DEAE-dextran mediated transfection, cationic lipid-mediated transfection, electroporation, transduction, infection, or other methods. Such methods are described in many standard laboratory manuals, such as Davis et al., Basic Methods In Molecular Biology (1986). It is specifically contemplated that the polypeptides of the present invention may in fact be expressed by a host cell lacking a recombinant vector.

[0382] In addition to encompassing host cells containing the vector constructs discussed herein, the invention also encompasses primary, secondary, and immortalized host cells of vertebrate origin, particularly mammalian origin, that have been engineered to delete or replace endogenous genetic material (e.g., the coding sequence), and/or to include genetic material (e.g., heterologous polynucleotide sequences) that is operably associated with polynucleotides of the invention, and which activates, alters, and/or amplifies endogenous polynucleotides. For example, techniques known in the art may be used to operably associate heterologous control regions (e.g., promoter and/or enhancer) and endogenous polynucleotide sequences via homologous recombination (see, e.g., U.S. Pat. No. 5,641,670, issued Jun. 24, 1997; International Publication Number WO 96/29411; International Publication Number WO 94/12650; Koller et al., Proc. Natl. Acad. Sci. USA 86:8932-8935 (1989); and Zijlstra et al., Nature 342:435-438 (1989), the disclosures of each of which are incorporated by reference in their entireties).

[0383] Polypeptides of the invention can be recovered and purified from recombinant cell cultures by well-known methods including ammonium sulfate or ethanol precipitation, acid extraction, anion or cation exchange chromatography, phosphocellulose chromatography, hydrophobic interaction chromatography, affinity chromatography, hydroxylapatite chromatography and lectin chromatography. Most preferably, high performance liquid chromatography (“HPLC”) is employed for purification.

[0384] Polypeptides of the present invention can also be recovered from: products purified from natural sources, including bodily fluids, tissues and cells, whether directly isolated or cultured; products of chemical synthetic procedures; and products produced by recombinant techniques from a prokaryotic or eukaryotic host, including, for example, bacterial, yeast, higher plant, insect, and mammalian cells. Depending upon the host employed in a recombinant production procedure, the polypeptides of the present invention may be glycosylated or may be non-glycosylated. In addition, polypeptides of the invention may also include an initial modified methionine residue, in some cases as a result of host-mediated processes. Thus, it is well known in the art that the N-terminal methionine encoded by the translation initiation codon generally is removed with high efficiency from any protein after translation in all eukaryotic cells. While the N-terminal methionine on most proteins also is efficiently removed in most prokaryotes, for some proteins, this prokaryotic removal process is inefficient, depending on the nature of the amino acid to which the N-termninal methionine is covalently linked.

[0385] In one embodiment, the yeast Pichia pastoris is used to express polypeptides of the invention in a eukaryotic system. Pichia pastoris is a methylotrophic yeast which can metabolize methanol as its sole carbon source. A main step in the methanol metabolization pathway is the oxidation of methanol to formaldehyde using O₂. This reaction is catalyzed by the enzyme alcohol oxidase. In order to metabolize methanol as its sole carbon source, Pichia pastoris must generate high levels of alcohol oxidase due, in part, to the relatively low affinity of alcohol oxidase for O₂. Consequently, in a growth medium depending on methanol as a main carbon source, the promoter region of one of the two alcohol oxidase genes (AOX1) is highly active. In the presence of methanol, alcohol oxidase produced from the AOX1 gene comprises up to approximately 30% of the total soluble protein in Pichia pastoris. See Ellis, S. B., et al., Mol. Cell. Biol. 5:1111-21 (1985); Koutz, P. J, et al., Yeast 5:167-77 (1989); Tschopp, J. F., et al., Nucl. Acids Res. 15:3859-76 (1987). Thus, a heterologous coding sequence, such as, for example, a polynucleotide of the present invention, under the transcriptional regulation of all or part of the AOX1 regulatory sequence is expressed at exceptionally high levels in Pichia yeast grown in the presence of methanol.

[0386] In one example, the plasmid vector pPIC9K is used to express DNA encoding a polypeptide of the invention, as set forth herein, in a Pichea yeast system essentially as described in “Pichia Protocols: Methods in Molecular Biology,” D. R. Higgins and J. Cregg, eds. The Humana Press, Totowa, N.J., 1998. This expression vector allows expression and secretion of a polypeptide of the invention by virtue of the strong AOX1 promoter linked to the Pichia pastoris alkaline phosphatase (PHO) secretory signal peptide (i.e., leader) located upstream of a multiple cloning site.

[0387] Many other yeast vectors could be used in place of pPIC9K, such as, pYES2, pYD1, pTEF1/Zeo, pYES2/GS, pPICZ, pGAPZ, pGAPZalpha, pPIC9, pPIC3.5, pHIL-D2, pHIL-S1, pPIC3.5K, and PAO815, as one skilled in the art would readily appreciate, as long as the proposed expression construct provides appropriately located signals for transcription, translation, secretion (if desired), and the like, including-an in-frame AUG as required.

[0388] In another embodiment, high-level expression of a heterologous coding sequence, such as, for example, a polynucleotide of the present invention, may be achieved by cloning the heterologous polynucleotide of the invention into an expression vector such as, for example, pGAPZ or pGAPZalpha, and growing the yeast culture in the absence of methanol.

[0389] In addition to encompassing host cells containing the vector constructs discussed herein, the invention also encompasses primary, secondary, and immortalized host cells of vertebrate origin, particularly mammalian origin, that have been engineered to delete or replace endogenous genetic material (e.g., coding sequence), and/or to include genetic material (e.g., heterologous polynucleotide sequences) that is operably associated with polynucleotides of the invention, and which activates, alters, and/or amplifies endogenous polynucleotides. For example, techniques known in the art may be used to operably associate heterologous control regions (e.g., promoter and/or enhancer) and endogenous polynucleotide sequences via homologous recombination (see, e.g., U.S. Pat. No. 5,641,670, issued Jun. 24, 1997; International Publication No. WO 96/29411, published Sep. 26, 1996; International Publication No. WO 94/12650, published Aug. 4, 1994; Koller et al., Proc. Natl. Acad. Sci. USA 86:8932-8935 (1989); and Zijlstra et al., Nature 342:435-438 (1989), the disclosures of each of which are incorporated by reference in their entireties).

[0390] In addition, polypeptides of the invention can be chemically synthesized using techniques known in the art (e.g., see Creighton, 1983, Proteins: Structures and Molecular Principles, W. H. Freeman & Co., N.Y., and Hunkapiller et al., Nature, 310:105-111 (1984)). For example, a polypeptide corresponding to a fragment of a polypeptide can be synthesized by use of a peptide synthesizer. Furthermore, if desired, nonclassical amino acids or chemical amino acid analogs can be introduced as a substitution or addition into the polypeptide sequence. Non-classical amino acids include, but are not limited to, to the D-isomers of the common amino acids, 2,4-diaminobutyric acid, a-amino isobutyric acid, 4-aminobutyric acid, Abu, 2-amino butyric acid, g-Abu, e-Ahx, 6-amino hexanoic acid, Aib, 2-amino isobutyric acid, 3-amino propionic acid, ornithine, norleucine, norvaline, hydroxyproline, sarcosine, citrulline, homocitrulline, cysteic acid, t-butylglycine, t-butylalanine, phenylglycine, cyclohexylalanine, b-alanine, fluoro-amino acids, designer amino acids such as b-methyl amino acids, Ca-methyl amino acids, Na-methyl amino acids, and amino acid analogs in general. Furthermore, the amino acid can be D (dextrorotary) or L (levorotary).

[0391] The invention encompasses polypeptides of the present invention which are differentially modified during or after translation, e.g., by glycosylation, acetylation, phosphorylation, amidation, derivatization by known protecting/blocking groups, proteolytic cleavage, linkage to an antibody molecule or other cellular ligand, etc. Any of numerous chemical modifications may be carried out by known techniques, including but not limited, to specific chemical cleavage by cyanogen bromide, trypsin, chymotrypsin, papain, V8 protease, NaBH₄; acetylation, formylation, oxidation, reduction; metabolic synthesis in the presence of tunicamycin; etc.

[0392] Additional post-translational modifications encompassed by the invention include, for example, e.g., N-linked or O-linked carbohydrate chains, processing of N-terminal or C-terminal ends), attachment of chemical moieties to the amino acid backbone, chemical modifications of N-linked or O-linked carbohydrate chains, and addition or deletion of an N-terminal methionine residue as a result of procaryotic host cell expression. The polypeptides may also be modified with a detectable label, such as an enzymatic, fluorescent, isotopic or affinity label to allow for detection and isolation of the protein.

[0393] Examples of suitable enzymes include horseradish peroxidase, alkaline phosphatase, beta-galactosidase, or acetylcholinesterase; examples of suitable prosthetic group complexes include streptavidin/biotin and avidin/biotin; examples of suitable fluorescent materials include umbelliferone, fluorescein, fluorescein isothiocyanate, rhodamine, dichlorotriazinylamine fluorescein, dansyl chloride or phycoerythrin; an example of a luminescent material includes luminol; examples of bioluminescent materials include luciferase, luciferin, and aequorin; and examples of suitable radioactive material include iodine (¹²¹I, ¹²³I, ¹²⁵I, ¹³¹I), carbon (¹⁴C), sulfur (³⁵S), tritium (³H), indium (¹¹¹In, ¹¹²In, ^{113m} In, ^{115m}In), technetium (⁹⁹Tc,^{99m}Tc), thallium (²⁰¹Ti), gallium (⁶⁸Ga, ⁶⁷Ga), palladium (¹⁰³Pd), molybdenum (⁹⁹Mo), xenon (¹³³Xe), fluorine (¹⁸F), ¹⁵³Sm, ¹⁷⁷Lu, ¹⁵⁹Gd, ¹⁴⁹Pm, ¹⁴⁰La, ¹⁷⁵Yb, ¹⁶⁶Ho, ⁹⁰Y, ⁴⁷Sc, ¹⁸⁶Re, ¹⁸⁸Re, ¹⁴²Pr, ¹⁰⁵Rh, and ⁹⁷Ru.

[0394] In specific embodiments, a polypeptide of the present invention or fragment or variant thereof is attached to macrocyclic chelators that associate with radiometal ions, including but not limited to, ¹⁷⁷Lu, ⁹⁰y, ¹⁶⁶Ho, and ¹⁵³Sm, to polypeptides. In a preferred embodiment, the radiometal ion associated with the macrocyclic chelators is ¹¹¹In. In another preferred embodiment, the radiometal ion associated with the macrocyclic chelator is ⁹⁰Y. In specific embodiments, the macrocyclic chelator is 1,4,7,10-tetraazacyclododecane-N,N′,N″,N′″-tetraacetic acid (DOTA). In other specific embodiments, DOTA is attached to an antibody of the invention or fragment thereof via a linker molecule. Examples of linker molecules useful for conjugating DOTA to a polypeptide are commonly known in the art—see, for example, DeNardo et al., Clin Cancer Res. 4(10):2483-90 (1998); Peterson et al., Bioconjug. Chem. 10(4):553-7 (1999); and Zimmerman et al., Nucl. Med. Biol. 26(8):943-50 (1999); which are hereby incorporated by reference in their entirety.

[0395] As mentioned, the proteins of the invention may be modified by either natural processes, such as posttranslational processing, or by chemical modification techniques which are well known in the art. It will be appreciated that the same type of modification may be present in the same or varying degrees at several sites in a given polypeptide. Polypeptides of the invention may be branched, for example, as a result of ubiquitination, and they may be cyclic, with or without branching. Cyclic, branched, and branched cyclic polypeptides may result from posttranslation natural processes or may be made by synthetic methods. Modifications include acetylation, acylation, ADP-ribosylation, amidation, covalent attachment of flavin, covalent attachment of a heme moiety, covalent attachment of a nucleotide or nucleotide derivative, covalent attachment of a lipid or lipid derivative, covalent attachment of phosphotidylinositol, cross-linking, cyclization, disulfide bond formation, demethylation, formation of covalent cross-links, formation of cysteine, formation of pyroglutamate, formylation, gamma-carboxylation, glycosylation, GPI anchor formation, hydroxylation, iodination, methylation, myristoylation, oxidation, pegylation, proteolytic processing, phosphorylation, prenylation, racemization, selenoylation, sulfation, transfer-RNA mediated addition of amino acids to proteins such as arginylation, and ubiquitination. (See, for instance, PROTEINS—STRUCTURE AND MOLECULAR PROPERTIES, 2nd Ed., T. E. Creighton, W. H. Freeman and Company, New York (1993); POSTTRANSLATIONAL COVALENT MODIFICATION OF PROTEINS, B. C. Johnson, Ed., Academic Press, New York, pgs. 1-12 (1983); Seifter et al., Meth. Enzymol. 182:626-646 (1990); Rattan etal., Ann. N.Y. Acad. Sci. 663:48-62 (1992)).

[0396] Also provided by the invention are chemically modified derivatives of the polypeptides of the invention which may provide additional advantages such as increased solubility, stability and circulating time of the polypeptide, or decreased immunogenicity (see U.S. Pat. No. 4,179,337). The chemical moieties for derivitization may be selected from water soluble polymers such as polyethylene glycol, ethylene glycol/propylene glycol copolymers, carboxymethylcellulose, dextran, polyvinyl alcohol and the like. The polypeptides may be modified at random positions within the molecule, or at predetermined positions within the molecule and may include one, two, three or more attached chemical moieties.

[0397] The polymer may be of any molecular weight, and may be branched or unbranched. For polyethylene glycol, the preferred molecular weight is between about 1 kDa and about 100 kDa (the term “about” indicating that in preparations of polyethylene glycol, some molecules will weigh more, some less, than the stated molecular weight) for ease in handling and manufacturing. Other sizes may be used, depending on the desired therapeutic profile (e.g., the duration of sustained release desired, the effects, if any on biological activity, the ease in handling, the degree or lack of antigenicity and other known effects of the polyethylene glycol to a therapeutic protein or analog). For example, the polyethylene glycol may have an average molecular weight of about 200, 500, 1000, 1500, 2000, 2500, 3000, 3500, 4000, 4500, 5000, 5500, 6000, 6500, 7000, 7500, 8000, 8500, 9000, 9500, 10,000, 10,500, 11,000, 11,500, 12,000, 12,500, 13,000, 13,500, 14,000, 14,500, 15,000, 15,500, 16,000, 16,500, 17,000, 17,500, 18,000, 18,500, 19,000, 19,500, 20,000, 25,000, 30,000, 35,000, 40,000, 45,000, 50,000, 55,000, 60,000, 65,000, 70,000, 75,000, 80,000, 85,000, 90,000, 95,000, or 100,000 kDa.

[0398] As noted above, the polyethylene glycol may have a branched structure. Branched polyethylene glycols are described, for example, in U.S. Pat. No. 5,643,575; Morpurgo et al., Appl. Biochem. Biotechnol. 56:59-72 (1996); Vorobjev et al., Nucleosides Nucleotides 18:2745-2750 (1999); and Caliceti et al., Bioconjug. Chem. 10:638-646 (1999), the disclosures of each of which are incorporated herein by reference.

[0399] The polyethylene glycol molecules (or other chemical moieties) should be attached to the protein with consideration of effects on functional or antigenic domains of the protein. There are a number of attachment methods available to those skilled in the art, such as, for example, the method disclosed in EP 0 401 384 (coupling PEG to G-CSF), herein incorporated by reference; see also Malik et al., Exp. Hematol. 20:1028-1035 (1992), reporting pegylation of GM-CSF using tresyl chloride. For example, polyethylene glycol may be covalently bound through amino acid residues via a reactive group, such as a free amino or carboxyl group. Reactive groups are those to which an activated polyethylene glycol molecule may be bound. The amino acid residues having a free amino group may include lysine residues and the N-terminal amino acid residues; those having a free carboxyl group may include aspartic acid residues glutamic acid residues and the C-terminal amino acid residue. Sulfhydryl groups may also be used as a reactive group for attaching the polyethylene glycol molecules. Preferred for therapeutic purposes is attachment at an amino group, such as attachment at the N-terminus or lysine group.

[0400] As suggested above, polyethylene glycol may be attached to proteins via linkage to any of a number of amino acid residues. For example, polyethylene glycol can be linked to proteins via covalent bonds to lysine, histidine, aspartic acid, glutamic acid, or cysteine residues. One or more reaction chemistries may be employed to attach polyethylene glycol to specific amino acid residues (e.g., lysine, histidine, aspartic acid, glutamic acid, or cysteine) of the protein or to more than one type of amino acid residue (e.g., lysine, histidine, aspartic acid, glutamic acid, cysteine and combinations thereof) of the protein.

[0401] One may specifically desire proteins chemically modified at the N-terminus. Using polyethylene glycol as an illustration of the present composition, one may select from a variety of polyethylene glycol molecules (by molecular weight, branching, etc.), the proportion of polyethylene glycol molecules to protein (polypeptide) molecules in the reaction mix, the type of pegylation reaction to be performed, and the method of obtaining the selected N-terminally pegylated protein. The method of obtaining the N-terminally pegylated preparation (i.e., separating this moiety from other monopegylated moieties if necessary) may be by purification of the N-terminally pegylated material from a population of pegylated protein molecules. Selective proteins chemically modified at the N-terminus modification may be accomplished by reductive alkylation which exploits differential reactivity of different types of primary amino groups (lysine versus the N-terminal) available for derivatization in a particular protein. Under the appropriate reaction conditions, substantially selective derivatization of the protein at the N-terminus with a carbonyl group containing polymer is achieved.

[0402] As indicated above, pegylation of the proteins of the invention may be accomplished by any number of means. For example, polyethylene glycol may be attached to the protein either directly or by an intervening linker. Linkerless systems for attaching polyethylene glycol to proteins are described in Delgado et al., Crit. Rev. Thera. Drug Carrier Sys. 9:249-304 (1992); Francis et al., Intern. J. of Hematol. 68:1-18 (1998); U.S. Pat. No. 4,002,531; U.S. Pat. No. 5,349,052; WO 95/06058; and WO 98/32466, the disclosures of each of which are incorporated herein by reference.

[0403] One system for attaching polyethylene glycol directly to amino acid residues of proteins without an intervening linker employs tresylated MPEG, which is produced by the modification of monmethoxy polyethylene glycol (MPEG) using tresylchloride (ClSO₂CH₂CF₃). Upon reaction of protein with tresylated MPEG, polyethylene glycol is directly attached to amine groups of the protein. Thus, the invention includes protein-polyethylene glycol conjugates produced by reacting proteins of the invention with a polyethylene glycol molecule having a 2,2,2-trifluoreothane sulphonyl group.

[0404] Polyethylene glycol can also be attached to proteins using a number of different intervening linkers. For example, U.S. Pat. No. 5,612,460, the entire disclosure of which is incorporated herein by reference, discloses urethane linkers for connecting polyethylene glycol to proteins. Protein-polyethylene glycol conjugates wherein the polyethylene glycol is attached to the protein by a linker can also be produced by reaction of proteins with compounds such as MPEG-succinimidylsuccinate, MPEG activated with 1,1′-carbonyldiimidazole, MPEG-2,4,5-trichloropenylcarbonate, MPEG-p-nitrophenolcarbonate, and various MPEG-succinate derivatives. A number of additional polyethylene glycol derivatives and reaction chemistries for attaching polyethylene glycol to proteins are described in International Publication No. WO 98/32466, the entire disclosure of which is incorporated herein by reference. Pegylated protein products produced using the reaction chemistries set out herein are included within the scope of the invention.

[0405] The number of polyethylene glycol moieties attached to each protein of the invention (i.e., the degree of substitution) may also vary. For example, the pegylated proteins of the invention may be linked, on average, to 1, 2, 3, 4, 5, 6, 7, 8, 9, 10, 12, 15, 17, 20, or more polyethylene glycol molecules. Similarly, the average degree of substitution within ranges such as 1-3, 2-4, 3-5, 4-6, 5-7, 6-8, 7-9, 8-10, 9-11, 10-12, 11-13, 12-14, 13-15, 14-16, 15-17, 16-18, 17-19, or 18-20 polyethylene glycol moieties per protein molecule. Methods for determining the degree of substitution are discussed, for example, in Delgado et al., Crit. Rev. Thera. Drug Carrier Sys. 9:249-304 (1992).

[0406] The polypeptides of the invention can be recovered and purified from chemical synthesis and recombinant cell cultures by standard methods which include, but are not limited to, ammonium sulfate or ethanol precipitation, acid extraction, anion or cation exchange chromatography, phosphocellulose chromatography, hydrophobic interaction chromatography, affinity chromatography, hydroxylapatite chromatography and lectin chromatography. Most preferably, high performance liquid chromatography (“HPLC”) is employed for purification. Well known techniques for refolding protein may be employed to regenerate active conformation when the polypeptide is denatured during isolation and/or purification.

[0407] The polypeptides of the invention may be in monomers or multimers (i.e., dimers, trimers, tetramers and higher multimers). Accordingly, the present invention relates to monomers and multimers of the polypeptides of the invention, their preparation, and compositions (preferably, Therapeutics) containing them. In specific embodiments, the polypeptides of the invention are monomers, dimers, trimers or tetramers. In additional embodiments, the multimers of the invention are at least dimers, at least trimers, or at least tetramers.

[0408] Multimers encompassed by the invention may be homomers or heteromers. As used herein, the term homomer refers to a multimer containing only polypeptides corresponding to a protein of the invention (e.g., the amino acid sequence of SEQ ID NO:Y, an amino acid sequence encoded by SEQ ID NO:X or the complement of SEQ ID NO:X, the amino acid sequence encoded by the portion of SEQ ID NO:X as defined in columns 8 and 9 of Table 2, and/or an amino acid sequence encoded by cDNA contained in ATCC Deposit No:Z (including fragments, variants, splice variants, and fusion proteins, corresponding to these as described herein)). These homomers may contain polypeptides having identical or different amino acid sequences. In a specific embodiment, a homomer of the invention is a multimer containing only polypeptides having an identical amino acid sequence. In another specific embodiment, a homomer of the invention is a multimer containing polypeptides having different amino acid sequences. In specific embodiments, the multimer of the invention is a homodimer (e.g., containing two polypeptides having identical or different amino acid sequences) or a homotrimer (e.g., containing three polypeptides having identical and/or different amino acid sequences). In additional embodiments, the homomeric multimer of the invention is at least a homodimer, at least a homotrimer, or at least a homotetramer.

[0409] As used herein, the term heteromer refers to a multimer containing one or more heterologous polypeptides (i.e., polypeptides of different proteins) in addition to the polypeptides of the invention. In a specific embodiment, the multimer of the invention is a heterodimer, a heterotrimer, or a heterotetramer. In additional embodiments, the heteromeric multimer of the invention is at least a heterodimer, at least a heterotrimer, or at least a heterotetramer.

[0410] Multimers of the invention may be the result of hydrophobic, hydrophilic, ionic and/or covalent associations and/or may be indirectly linked by, for example, liposome formation. Thus, in one embodiment, multimers of the invention, such as, for example, homodimers or homotrimers, are formed when polypeptides of the invention contact one another in solution. In another embodiment, heteromultimers of the invention, such as, for example, heterotrimers or heterotetramers, are formed when polypeptides of the invention contact antibodies to the polypeptides of the invention (including antibodies to the heterologous polypeptide sequence in a fusion protein of the invention) in solution. In other embodiments, multimers of the invention are formed by covalent associations with and/or between the polypeptides of the invention. Such covalent associations may involve one or more amino acid residues contained in the polypeptide sequence (e.g., that recited in SEQ ID NO:Y, encoded by the portion of SEQ ID NO:X as defined in columns 8 and 9 of Table 2, and/or encoded by the cDNA contained in ATCC Deposit No:Z). In one instance, the covalent associations are cross-linking between cysteine residues located within the polypeptide sequences which interact in the native (i.e., naturally occurring) polypeptide. In another instance, the covalent associations are the consequence of chemical or recombinant manipulation. Alternatively, such covalent associations may involve one or more amino acid residues contained in the heterologous polypeptide sequence in a fusion protein. In one example, covalent associations are between the heterologous sequence contained in a fusion protein of the invention (see, e.g., U.S. Pat. No. 5,478,925). In a specific example, the covalent associations are between the heterologous sequence contained in a Fc fusion protein of the invention (as described herein). In another specific example, covalent associations of fusion proteins of the invention are between heterologous polypeptide sequence from another protein that is capable of forming covalently associated multimers, such as for example, osteoprotegerin (see, e.g., International Publication NO: WO 98/49305, the contents of which are herein incorporated by reference in its entirety). In another embodiment, two or more polypeptides of the invention are joined through peptide linkers. Examples include those peptide linkers described in U.S. Pat. No. 5,073,627 (hereby incorporated by reference). Proteins comprising multiple polypeptides of the invention separated by peptide linkers may be produced using conventional recombinant DNA technology.

[0411] Another method for preparing multimer polypeptides of the invention involves use of polypeptides of the invention fused to a leucine zipper or isoleucine zipper polypeptide sequence. Leucine zipper and isoleucine zipper domains are polypeptides that promote multimerization of the proteins in which they are found. Leucine zippers were originally identified in several DNA-binding proteins (Landschulz et al., Science 240:1759, (1988)), and have since been found in a variety of different proteins. Among the known leucine zippers are naturally occurring peptides and derivatives thereof that dimerize or trimerize. Examples of leucine zipper domains suitable for producing soluble multimeric proteins of the invention are those described in PCT application WO 94/10308, hereby incorporated by reference. Recombinant fusion proteins comprising a polypeptide of the invention fused to a polypeptide sequence that dimerizes or trimerizes in solution are expressed in suitable host cells, and the resulting soluble multimeric fusion protein is recovered from the culture supernatant using techniques known in the art.

[0412] Trimeric polypeptides of the invention may offer the advantage of enhanced biological activity. Preferred leucine zipper moieties and isoleucine moieties are those that preferentially form trimers. One example is a leucine zipper derived from lung surfactant protein D (SPD), as described in Hoppe et al. (FEBS Letters 344:191, (1994)) and in U.S. patent application Ser. No. 08/446,922, hereby incorporated by reference. Other peptides derived from naturally occurring trimeric proteins may be employed in preparing trimeric polypeptides of the invention.

[0413] In another example, proteins of the invention are associated by interactions between Flag® polypeptide sequence contained in fusion proteins of the invention containing Flag® polypeptide sequence. In a further embodiment, proteins of the invention are associated by interactions between heterologous polypeptide sequence contained in Flag® fusion proteins of the invention and anti-Flag® antibody.

[0414] The multimers of the invention may be generated using chemical techniques known in the art. For example, polypeptides desired to be contained in the multimers of the invention may be chemically cross-linked using linker molecules and linker molecule length optimization techniques known in the art (see, e.g., U.S. Pat. No. 5,478,925, which is herein incorporated by reference in its entirety). Additionally, multimers of the invention may be generated using techniques known in the art to form one or more inter-molecule cross-links between the cysteine residues located within the sequence of the polypeptides desired to be contained in the multimer (see, e.g., U.S. Pat. No. 5,478,925, which is herein incorporated by reference in its entirety). Further, polypeptides of the invention may be routinely modified by the addition of cysteine or biotin to the C-terminus or N-terminus of the polypeptide and techniques known in the art may be applied to generate multimers containing one or more of these modified polypeptides (see, e.g., U.S. Pat. No. 5,478,925, which is herein incorporated by reference in its entirety). Additionally, techniques known in the art may be applied to generate liposomes containing the polypeptide components desired to be contained in the multimer of the invention (see, e.g., U.S. Pat. No. 5,478,925, which is herein incorporated by reference in its entirety).

[0415] Alternatively, multimers of the invention may be generated using genetic engineering techniques known in the art. In one embodiment, polypeptides contained in multimers of the invention are produced recombinantly using fusion protein technology described herein or otherwise known in the art (see, e.g., U.S. Pat. No. 5,478,925, which is herein incorporated by reference in its entirety). In a specific embodiment, polynucleotides coding for a homodimer of the invention are generated by ligating a polynucleotide sequence encoding a polypeptide of the invention to a sequence encoding a linker polypeptide and then further to a synthetic polynucleotide encoding the translated product of the polypeptide in the reverse orientation from the original C-terminus to the N-terminus (lacking the leader sequence) (see, e.g., U.S. Pat. No. 5,478,925, which is herein incorporated by reference in its entirety). In another embodiment, recombinant techniques described herein or otherwise known in the art are applied to generate recombinant polypeptides of the invention which contain a transmembrane domain (or hydrophobic or signal peptide) and which can be incorporated by membrane reconstitution techniques into liposomes (see, e.g., U.S. Pat. No. 5,478,925, which is herein incorporated by reference in its entirety).

Antibodies

[0416] Further polypeptides of the invention relate to antibodies and T-cell antigen receptors (TCR) which immunospecifically bind a polypeptide, polypeptide fragment, or variant of the invention (e.g., a polypeptide or fragment or variant of the amino acid sequence of SEQ ID NO:Y or a polypeptide encoded by the cDNA contained in ATCC Deposit No:Z, and/or an epitope, of the present invention) as determined by immunoassays well known in the art for assaying specific antibody-antigen binding. Antibodies of the invention include, but are not limited to, polyclonal, monoclonal, multispecific, human, humanized or chimeric antibodies, single chain antibodies, Fab fragments, F(ab′) fragments, fragments produced by a Fab expression library, anti-idiotypic (anti-Id) antibodies (including, e.g., anti-Id antibodies to antibodies of the invention), intracellularly-made antibodies (i.e., intrabodies), and epitope-binding fragments of any of the above. The term “antibody,” as used herein, refers to immunoglobulin molecules and immunologically active portions of immunoglobulin molecules, i.e., molecules that contain an antigen binding site that immunospecifically binds an antigen. The immunoglobulin molecules of the invention can be of any type (e.g., IgG, IgE, IgM, IgD, IgA and IgY), class (e.g., IgG1, IgG2, IgG3, IgG4, IgA1 and IgA2) or subclass of immunoglobulin molecule. In preferred embodiments, the immunoglobulin molecules of the invention are IgG1. In other preferred embodiments, the immunoglobulin molecules of the invention are IgG4.

[0417] Most preferably the antibodies are human antigen-binding antibody fragments of the present invention and include, but are not limited to, Fab, Fab′ and F(ab′)2, Fd, single-chain Fvs (scFv), single-chain antibodies, disulfide-linked Fvs (sdFv) and fragments comprising either a VL or VH domain. Antigen-binding antibody fragments, including single-chain antibodies, may comprise the variable region(s) alone or in combination with the entirety or a portion of the following: hinge region, CH1, CH2, and CH3 domains. Also included in the invention are antigen-binding fragments also comprising any combination of variable region(s) with a hinge region, CH1, CH2, and CH3 domains. The antibodies of the invention may be from any animal origin including birds and mammals. Preferably, the antibodies are human, murine (e.g., mouse and rat), donkey, ship rabbit, goat, guinea pig, camel, horse, or chicken. As used herein, “human” antibodies include antibodies having the amino acid sequence of a human immunoglobulin and include antibodies isolated from human immunoglobulin libraries or from animals transgenic for one or more human immunoglobulin and that do not express endogenous immunoglobulins, as described infra and, for example in, U.S. Pat. No. 5,939,598 by Kucherlapati et al.

[0418] The antibodies of the present invention may be monospecific, bispecific, trispecific or of greater multispecificity. Multispecific antibodies may be specific for different epitopes of a polypeptide of the present invention or may be specific for both a polypeptide of the present invention as well as for a heterologous epitope, such as a heterologous polypeptide or solid support material. See, e.g., PCT publications WO 93/17715; WO 92/08802; WO 91/00360; WO 92/05793; Tutt, et al., J. Immunol. 147:60-69 (1991); U.S. Pat. Nos. 4,474,893; 4,714,681; 4,925,648; 5,573,920; 5,601,819; Kostelny et al., J. Immunol. 148:1547-1553 (1992).

[0419] Antibodies of the present invention may be described or specified in terms of the epitope(s) or portion(s) of a polypeptide of the present invention which they recognize or specifically bind. The epitope(s) or polypeptide portion(s) may be specified as described herein, e.g., by N-terminal and C-terminal positions, or by size in contiguous amino acid residues, or listed in the Tables and Figures. Preferred epitopes of the invention include the predicted epitopes shown in column 7 of Table 1B, as well as polynucleotides that encode these epitopes. Antibodies which specifically bind any epitope or polypeptide of the present invention may also be excluded. Therefore, the present invention includes antibodies that specifically bind polypeptides of the present invention, and allows for the exclusion of the same.

[0420] Antibodies of the present invention may also be described or specified in terms of their cross-reactivity. Antibodies that do not bind any other analog, ortholog, or homolog of a polypeptide of the present invention are included. Antibodies that bind polypeptides with at least 95%, at least 90%, at least 85%, at least 80%, at least 75%, at least 70%, at least 65%, at least 60%, at least 55%, and at least 50% identity (as calculated using methods known in the art and described herein) to a polypeptide of the present invention are also included in the present invention. In specific embodiments, antibodies of the present invention cross-react with murine, rat and/or rabbit homologs of human proteins and the corresponding epitopes thereof. Antibodies that do not bind polypeptides with less than 95%, less than 90%, less than 85%, less than 80%, less than 75%, less than 70%, less than 65%, less than 60%, less than 55%, and less than 50% identity (as calculated using methods known in the art and described herein) to a polypeptide of the present invention are also included in the present invention. In a specific embodiment, the above-described cross-reactivity is with respect to any single specific antigenic or immunogenic polypeptide, or combination(s) of 2, 3, 4, 5, or more of the specific antigenic and/or immunogenic polypeptides disclosed herein. Further included in the present invention are antibodies which bind polypeptides encoded by polynucleotides which hybridize to a polynucleotide of the present invention under stringent hybridization conditions (as described herein). Antibodies of the present invention may also be described or specified in terms of their binding affinity to a polypeptide of the invention. Preferred binding affinities include those with a dissociation constant or Kd less than 5×10⁻² M, 10⁻² M, 5×10⁻³ M, 10⁻³ M, 5×10⁻⁴ M, 10⁻⁴ M, 5×10⁻⁵ M, 10⁻⁵ M, 5×10⁻⁶ M, 10⁻⁶M, 5×10⁻⁷ M, 10⁻⁷ M, 5×10⁻⁸ M, 10⁻⁸ M, 5×10⁻⁹ M, 10⁻⁹ M, 5×10⁻¹⁰ M, 10⁻¹⁰ M, 5×10⁻¹¹ M, 10⁻¹¹ M, 5×10⁻¹² M, 10⁻¹² M, 5×10⁻¹³ M, 10⁻¹³ M, 5×10⁻¹⁴ M, 10⁻¹⁴ M, 5×10⁻¹⁵ M, or 10⁻¹⁵ M.

[0421] The invention also provides antibodies that competitively inhibit binding of an antibody to an epitope of the invention as determined by any method known in the art for determining competitive binding, for example, the immunoassays described herein. In preferred embodiments, the antibody competitively inhibits binding to the epitope by at least 95%, at least 90%, at least 85%, at least 80%, at least 75%, at least 70%, at least 60%, or at least 50%.

[0422] Antibodies of the present invention may act as agonists or antagonists of the polypeptides of the present invention. For example, the present invention includes antibodies which disrupt the receptor/ligand interactions with the polypeptides of the invention either partially or fully. Preferably, antibodies of the present invention bind an antigenic epitope disclosed herein, or a portion thereof. The invention features both receptor-specific antibodies and ligand-specific antibodies. The invention also features receptor-specific antibodies which do not prevent ligand binding but prevent receptor activation. Receptor activation (i.e., signaling) may be determined by techniques described herein or otherwise known in the art. For example, receptor activation can be determined by detecting the phosphorylation (e.g., tyrosine or serine/threonine) of the receptor or its substrate by immunoprecipitation followed by western blot analysis (for example, as described supra). In specific embodiments, antibodies are provided that inhibit ligand activity or receptor activity by at least 95%, at least 90%, at least 85%, at least 80%, at least 75%, at least 70%, at least 60%, or at least 50% of the activity in absence of the antibody.

[0423] The invention also features receptor-specific antibodies which both prevent ligand binding and receptor activation as well as antibodies that recognize the receptor-ligand complex, and, preferably, do not specifically recognize the unbound receptor or the unbound ligand. Likewise, included in the invention are neutralizing antibodies which bind the ligand and prevent binding of the ligand to the receptor, as well as antibodies which bind the ligand, thereby preventing receptor activation, but do not prevent the ligand from binding the receptor. Further included in the invention are antibodies which activate the receptor. These antibodies may act as receptor agonists, i.e., potentiate or activate either all or a subset of the biological activities of the ligand-mediated receptor activation, for example, by inducing dimerization of the receptor. The antibodies may be specified as agonists, antagonists or inverse agonists for biological activities comprising the specific biological activities of the peptides of the invention disclosed herein. The above antibody agonists can be made using methods known in the art. See, e.g., PCT publication WO 96/40281; U.S. Pat. No. 5,811,097; Deng et al., Blood 92(6):1981-1988 (1998); Chen et al., Cancer Res. 58(16):3668-3678 (1998); Harrop et al., J. Immunol. 161(4):1786-1794 (1998); Zhu et al., Cancer Res. 58(15):3209-3214 (1998); Yoon et al., J. Immunol. 160(7):3170-3179 (1998); Prat et al., J. Cell. Sci. 1 1 l(Pt2):237-247 (1998); Pitard et. al., J. Immunol. Methods 205(2):177-190 (1997); Liautard et al., Cytokine 9(4):233-241 (1997); Carlson et al., J. Biol. Chem. 272(17):11295-11301 (1997); Taryman et al., Neuron 14(4):755-762 (1995); Muller et al., Structure 6(9):1153-1167 (1998); Bartunek et al., Cytokine 8(1):14-20 (1996) (which are all incorporated by reference herein in their entireties).

[0424] Antibodies of the present invention may be used, for example, to purify, detect, and target the polypeptides of the present invention, including both in vitro and in vivo diagnostic and therapeutic methods. For example, the antibodies have utility in immunoassays for qualitatively and quantitatively measuring levels of the polypeptides of the present invention in biological samples. See, e.g., Harlow et al., Antibodies: A Laboratory Manual, (Cold Spring Harbor Laboratory Press, 2nd ed. 1988); incorporated by reference herein in its entirety.

[0425] As discussed in more detail below, the antibodies of the present invention may be used either alone or in combination with other compositions. The antibodies may further be recombinantly fused to a heterologous polypeptide at the N— or C-terminus or chemically conjugated (including covalent and non-covalent conjugations) to polypeptides or other compositions. For example, antibodies of the present invention may be recombinantly fused or conjugated to molecules useful as labels in detection assays and effector molecules such as heterologous polypeptides, drugs, radionuclides, or toxins. See, e.g., PCT publications WO 92/08495; WO 91/14438; WO 89/12624; U.S. Pat. No. 5,314,995; and EP 396,387; the disclosures of which are incorporated herein by reference in their entireties.

[0426] The antibodies of the invention include derivatives that are modified, i.e, by the covalent attachment of any type of molecule to the antibody such that covalent attachment does not prevent the antibody from generating an anti-idiotypic response. For example, but not by way of limitation, the antibody derivatives include antibodies that have been modified, e.g., by glycosylation, acetylation, pegylation, phosphylation, amidation, derivatization by known protecting/blocking groups, proteolytic cleavage, linkage to a cellular ligand or other protein, etc. Any of numerous chemical modifications may be carried out by known techniques, including, but not limited to specific chemical cleavage, acetylation, formylation, metabolic synthesis of tunicamycin, etc. Additionally, the derivative may contain one or more non-classical amino acids.

[0427] The antibodies of the present invention may be generated by any suitable method known in the art. Polyclonal antibodies to an antigen-of-interest can be produced by various procedures well known in the art. For example, a polypeptide of the invention can be administered to various host animals including, but not limited to, rabbits, mice, rats, etc. to induce the production of sera containing polyclonal antibodies specific for the antigen. Various adjuvants may be used to increase the immunological response, depending on the host species, and include but are not limited to, Freund's (complete and incomplete), mineral gels such as aluminum hydroxide, surface active substances such as lysolecithin, pluronic polyols, polyanions, peptides, oil emulsions, keyhole limpet hemocyanins, dinitrophenol, and potentially useful human adjuvants such as BCG (bacille Calmette-Guerin) and corynebacterium parvum. Such adjuvants are also well known in the art.

[0428] Monoclonal antibodies can be prepared using a wide variety of techniques known in the art including the use of hybridoma, recombinant, and phage display technologies, or a combination thereof. For example, monoclonal antibodies can be produced using hybridoma techniques including those known in the art and taught, for example, in Harlow et al., Antibodies: A Laboratory Manual, (Cold Spring Harbor Laboratory Press, 2nd ed. 1988); Hammerling, et al., in: Monoclonal Antibodies and T-Cell Hybridomas 563-681 (Elsevier, N.Y., 1981) (said references incorporated by reference in their entireties). The term “monoclonal antibody” as used herein is not limited to antibodies produced through hybridoma technology. The term “monoclonal antibody” refers to an antibody that is derived from a single clone, including any eukaryotic, prokaryotic, or phage clone, and not the method by which it is produced.

[0429] Methods for producing and screening for specific antibodies using hybridoma technology are routine and well known in the art and are discussed in detail in the Examples. In a non-limiting example, mice can be immunized with a polypeptide of the invention or a cell expressing such peptide. Once an immune response is detected, e.g., antibodies specific for the antigen are detected in the mouse serum, the mouse spleen is harvested and splenocytes isolated. The splenocytes are then fused by well known techniques to any suitable myeloma cells, for example cells from cell line SP20 available from the ATCC. Hybridomas are selected and cloned by limited dilution. The hybridoma clones are then assayed by methods known in the art for cells that secrete antibodies capable of binding a polypeptide of the invention. Ascites fluid, which generally contains high levels of antibodies, can be generated by immunizing mice with positive hybridoma clones.

[0430] Accordingly, the present invention provides methods of generating monoclonal antibodies as well as antibodies produced by the method comprising culturing a hybridoma cell secreting an antibody of the invention wherein, preferably, the hybridoma is generated by fusing splenocytes isolated from a mouse immunized with an antigen of the invention with myeloma cells and then screening the hybridomas resulting from the fusion for hybridoma clones that secrete an antibody able to bind a polypeptide of the invention.

[0431] Another well known method for producing both polyclonal and monoclonal human B cell lines is transformation using Epstein Barr Virus (EBV). Protocols for generating EBV-transformed B cell lines are commonly known in the art, such as, for example, the protocol outlined in Chapter 7.22 of Current Protocols in Immunology, Coligan et al., Eds., 1994, John Wiley & Sons, NY, which is hereby incorporated in its entirety by reference. The source of B cells for transformation is commonly human peripheral blood, but B cells for transformation may also be derived from other sources including, but not limited to, lymph nodes, tonsil, spleen, tumor tissue, and infected tissues. Tissues are generally made into single cell suspensions prior to EBV transformation. Additionally, steps may be taken to either physically remove or inactivate T cells (e.g., by treatment with cyclosporin A) in B cell-containing samples, because T cells from individuals seropositive for anti-EBV antibodies can suppress B cell immortalization by EBV.

[0432] In general, the sample containing human B cells is innoculated with EBV, and cultured for 3-4 weeks. A typical source of EBV is the culture supernatant of the B95-8 cell line (ATCC #VR-1492). Physical signs of EBV transformation can generally be seen towards the end of the 3-4 week culture period. By phase-contrast microscopy, transformed cells may appear large, clear, hairy and tend to aggregate in tight clusters of cells. Initially, EBV lines are generally polyclonal. However, over prolonged periods of cell cultures, EBV lines may become monoclonal or polyclonal as a result of the selective outgrowth of particular B cell clones. Alternatively, polyclonal EBV transformed lines may be subcloned (e.g., by limiting dilution culture) or fused with a suitable fusion partner and plated at limiting dilution to obtain monoclonal B cell lines. Suitable fusion partners for EBV transformed cell lines include mouse myeloma cell lines (e.g., SP2/0, X63-Ag8.653), heteromyeloma cell lines (human x mouse; e.g, SPAM-8, SBC-H20, and CB-F7), and human cell lines (e.g., GM 1500, SKO-007, RPMI 8226, and KR-4). Thus, the present invention also provides a method of generating polyclonal or monoclonal human antibodies against polypeptides of the invention or fragments thereof, comprising EBV-transformation of human B cells.

[0433] Antibody fragments which recognize specific epitopes may be generated by known techniques. For example, Fab and F(ab′)2 fragments of the invention may be produced by proteolytic cleavage of immunoglobulin molecules, using enzymes such as papain (to produce Fab fragments) or pepsin (to produce F(ab′)2 fragments). F(ab′)2 fragments contain the variable region, the light chain constant region and the CH1 domain of the heavy chain.

[0434] For example, the antibodies of the present invention can also be generated using various phage display methods known in the art. In phage display methods, functional antibody domains are displayed on the surface of phage particles which carry the polynucleotide sequences encoding them. In a particular embodiment, such phage can be utilized to display antigen binding domains expressed from a repertoire or combinatorial antibody library (e.g., human or murine). Phage expressing an antigen binding domain that binds the antigen of interest can be selected or identified with antigen, e.g., using labeled antigen or antigen bound or captured to a solid surface or bead. Phage used in these methods are typically filamentous phage including fd and M13 binding domains expressed from phage with Fab, Fv or disulfide stabilized Fv antibody domains recombinantly fused to either the phage gene III or gene VIII protein. Examples of phage display methods that can be used to make the antibodies of the present invention include those disclosed in Brinkman et al., J. Immunol. Methods 182:41-50 (1995); Ames et al., J. Immunol. Methods 184:177-186 (1995); Kettleborough et al., Eur. J. Immunol. 24:952-958 (1994); Persic et al., Gene 187 9-18 (1997); Burton et al., Advances in Immunology 57:191-280 (1994); PCT application No. PCT/GB91/01134; PCT publications WO 90/02809; WO 91/10737; WO 92/01047; WO 92/18619; WO 93/11236; WO 95/15982; WO 95/20401; and U.S. Pat. Nos. 5,698,426; 5,223,409; 5,403,484; 5,580,717; 5,427,908; 5,750,753; 5,821,047; 5,571,698; 5,427,908; 5,516,637; 5,780,225; 5,658,727; 5,733,743 and 5,969,108; each of which is incorporated herein by reference in its entirety.

[0435] As described in the above references, after phage selection, the antibody coding regions from the phage can be isolated and used to generate whole antibodies, including human antibodies, or any other desired antigen binding fragment, and expressed in any desired host, including mammalian cells, insect cells, plant cells, yeast, and bacteria, e.g., as described in detail below. For example, techniques to recombinantly produce Fab, Fab′ and F(ab′)2 fragments can also be employed using methods known in the art such as those disclosed in PCT publication WO 92/22324; Mullinax et al., BioTechniques 12(6):864-869 (1992); and Sawai et al., AJRI 34:26-34 (1995); and Better et al., Science 240:1041-1043 (1988) (said references incorporated by reference in their entireties).

[0436] Examples of techniques which can be used to produce single-chain Fvs and antibodies include those described in U.S. Pat. Nos. 4,946,778 and 5,258,498; Huston et al., Methods in Enzymology 203:46-88 (1991); Shu et al., PNAS 90:7995-7999 (1993); and Skerra et al., Science 240:1038-1040 (1988). For some uses, including in vivo use of antibodies in humans and in vitro detection assays, it may be preferable to use chimeric, humanized, or human antibodies. A chimeric antibody is a molecule in which different portions of the antibody are derived from different animal species, such as antibodies having a variable region derived from a murine monoclonal antibody and a human immunoglobulin constant region. Methods for producing chimeric antibodies are known in the art. See e.g., Morrison, Science 229:1202 (1985); Oi et al., BioTechniques 4:214 (1986); Gillies et al., (1989) J. Immunol. Methods 125:191-202; U.S. Pat. Nos. 5,807,715; 4,816,567; and 4,816397, which are incorporated herein by reference in their entirety. Humanized antibodies are antibody molecules from non-human species antibody that binds the desired antigen having one or more complementarity determining regions (CDRs) from the non-human species and a framework regions from a human immunoglobulin molecule. Often, framework residues in the human framework regions will be substituted with the corresponding residue from the CDR donor antibody to alter, preferably improve, antigen binding. These framework substitutions are identified by methods well known in the art, e.g., by modeling of the interactions of the CDR and framework residues to identify framework residues important for antigen binding and sequence comparison to identify unusual framework residues at particular positions. (See, e.g., Queen et al., U.S. Pat. No. 5,585,089; Riechmann et al., Nature 332:323 (1988), which are incorporated herein by reference in their entireties.) Antibodies can be humanized using a variety of techniques known in the art including, for example, CDR-grafting (EP 239,400; PCT publication WO 91/09967; U.S. Pat. Nos. 5,225,539; 5,530,101; and 5,585,089), veneering or resurfacing (EP 592,106; EP 519,596; Padlan, Molecular Immunology 28(4/5):489-498 (1991); Studnicka et al., Protein Engineering 7(6):805-814 (1994); Roguska. et al., PNAS 91:969-973 (1994)), and chain shuffling (U.S. Pat. No. 5,565,332).

[0437] Completely human antibodies are particularly desirable for therapeutic treatment of human patients. Human antibodies can be made by a variety of methods known in the art including phage display methods described above using antibody libraries derived from human immunoglobulin sequences. See also, U.S. Pat. Nos. 4,444,887 and 4,716,111; and PCT publications WO 98/46645, WO 98/50433, WO 98/24893, WO 98/16654, WO 96/34096, WO 96/33735, and WO 91/10741; each of which is incorporated herein by reference in its entirety.

[0438] Human antibodies can also be produced using transgenic mice which are incapable of expressing functional endogenous immunoglobulins, but which can express human immunoglobulin genes. For example, the human heavy and light chain immunoglobulin gene complexes may be introduced randomly or by homologous recombination into mouse embryonic stem cells. Alternatively, the human variable region, constant region, and diversity region may be introduced into mouse embryonic stem cells in addition to the human heavy and light chain genes. The mouse heavy and light chain immunoglobulin genes may be rendered non-functional separately or simultaneously with the introduction of human immunoglobulin loci by homologous recombination. In particular, homozygous deletion of the JH region prevents endogenous antibody production. The modified embryonic stem cells are expanded and microinjected into blastocysts to produce chimeric mice. The chimeric mice are then bred to produce homozygous offspring which express human antibodies. The transgenic mice are immunized in the normal fashion with a selected antigen, e.g., all or a portion of a polypeptide of the invention. Monoclonal antibodies directed against the antigen can be obtained from the immunized, transgenic mice using conventional hybridoma technology. The human immunoglobulin transgenes harbored by the transgenic mice rearrange during B cell differentiation, and subsequently undergo class switching and somatic mutation. Thus, using such a technique, it is possible to produce therapeutically useful IgG, IgA, IgM and IgE antibodies. For an overview of this technology for producing human antibodies, see Lonberg and Huszar, Int. Rev. Immunol. 13:65-93 (1995). For a detailed discussion of this technology for producing human antibodies and human monoclonal antibodies and protocols for producing such antibodies, see, e.g., PCT publications WO 98/24893; WO 92/01047; WO 96/34096; WO 96/33735; European Patent No. 0 598 877; U.S. Pat. Nos. 5,413,923; 5,625,126; 5,633,425; 5,569,825; 5,661,016; 5,545,806; 5,814,318; 5,885,793; 5,916,771; 5,939,598; 6,075,181; and 6,114,598, which are incorporated by reference herein in their entirety. In addition, companies such as Abgenix, Inc. (Freemont, Calif.) and Genpharm (San Jose, Calif.) can be engaged to provide human antibodies directed against a selected antigen using technology similar to that described above.

[0439] Completely human antibodies which recognize a selected epitope can be generated using a technique referred to as “guided selection.” In this approach a selected non-human monoclonal antibody, e.g., a mouse antibody, is used to guide the selection of a completely human antibody recognizing the same epitope. (Jespers et al., Bio/technology 12:899-903 (1988)).

[0440] Further, antibodies to the polypeptides of the invention can, in turn, be utilized to generate anti-idiotype antibodies that “mimic” polypeptides of the invention using techniques well known to those skilled in the art. (See, e.g., Greenspan & Bona, FASEB J. 7(5):437-444; (1989) and Nissinoff, J. Immunol. 147(8):2429-2438 (1991)). For example antibodies which bind to and competitively inhibit polypeptide multimerization and/or binding of a polypeptide of the invention to a ligand can be used to generate anti-idiotypes that “mimic” the polypeptide multimerization and/or binding domain and, as a consequence, bind to and neutralize polypeptide and/or its ligand. Such neutralizing anti-idiotypes or Fab fragments of such anti-idiotypes can be used in therapeutic regimens to neutralize polypeptide ligand(s)/receptor(s). For example, such anti-idiotypic antibodies can be used to bind a polypeptide of the invention and/or to bind its ligand(s)/receptor(s), and thereby block its biological activity. Alternatively, antibodies which bind to and enhance polypeptide multimerization and/or binding, and/or receptor/ligand multimerization, binding and/or signaling can be used to generate anti-idiotypes that function as agonists of a polypeptide of the invention and/or its ligand/receptor. Such agonistic anti-idiotypes or Fab fragments of such anti-idiotypes can be used in therapeutic regimens as agonists of the polypeptides of the invention or its ligand(s)/receptor(s). For example, such anti-idiotypic antibodies can be used to bind a polypeptide of the invention and/or to bind its ligand(s)/receptor(s), and thereby promote or enhance its biological activity.

[0441] Intrabodies of the invention can be produced using methods known in the art, such as those disclosed and reviewed in Chen et al., Hum. Gene Ther. 5:595-601 (1994); Marasco, W. A., Gene Ther. 4:11-15 (1997); Rondon and Marasco, Annu. Rev. Microbiol. 51:257-283 (1997); Proba et al., J. Mol. Biol. 275:245-253 (1998); Cohen et al., Oncogene 17:2445-2456 (1998); Ohage and Steipe, J. Mol. Biol. 291:1119-1128 (1999); Ohage et al., J. Mol. Biol. 291:1129-1134 (1999); Wirtz and Steipe, Protein Sci. 8:2245-2250 (1999); Zhu et al., J. Immunol. Methods 231:207-222 (1999); and references cited therein.

Polynucleotides Encodine Antibodies

[0442] The invention further provides polynucleotides comprising a nucleotide sequence encoding an antibody of the invention and fragments thereof. The invention also encompasses polynucleotides that hybridize under stringent or alternatively, under lower stringency hybridization conditions, e.g., as defined supra, to polynucleotides that encode an antibody, preferably, that specifically binds to a polypeptide of the invention, preferably, an antibody that binds to a polypeptide having the amino acid sequence of SEQ ID NO:Y, to a polypeptide encoded by a portion of SEQ ID NO:X as defined in columns 8 and 9 of Table 2, and/or to a polypeptide encoded by the cDNA contained in ATCC Deposit No:Z.

[0443] The polynucleotides may be obtained, and the nucleotide sequence of the polynucleotides determined, by any method known in the art. For example, if the nucleotide sequence of the antibody is known, a polynucleotide encoding the antibody may be assembled from chemically synthesized oligonucleotides (e.g., as described in Kutmeier et al., BioTechniques 17:242 (1994)), which, briefly, involves the synthesis of overlapping oligonucleotides containing portions of the sequence encoding the antibody, annealing and ligating of those oligonucleotides, and then amplification of the ligated oligonucleotides by PCR.

[0444] Alternatively, a polynucleotide encoding an antibody may be generated from nucleic acid from a suitable source. If a clone containing a nucleic acid encoding a particular antibody is not available, but the sequence of the antibody molecule is known, a nucleic acid encoding the immunoglobulin may be chemically synthesized or obtained from a suitable source (e.g., an antibody cDNA library, or a cDNA library generated from, or nucleic acid, preferably poly A+ RNA, isolated from, any tissue or cells expressing the antibody, such as hybridoma cells selected to express an antibody of the invention) by PCR amplification using synthetic primers hybridizable to the 3′ and 5′ ends of the sequence or by cloning using an oligonucleotide probe specific for the particular gene sequence to identify, e.g., a cDNA clone from a cDNA library that encodes the antibody. Amplified nucleic acids generated by PCR may then be cloned into replicable cloning vectors using any method well known in the art.

[0445] Once the nucleotide sequence and corresponding amino acid sequence of the antibody is determined, the nucleotide sequence of the antibody may be manipulated using methods well known in the art for the manipulation of nucleotide sequences, e.g., recombinant DNA techniques, site directed mutagenesis, PCR, etc. (see, for example, the techniques described in Sambrook et al., 1990, Molecular Cloning, A Laboratory Manual, 2d Ed., Cold Spring Harbor Laboratory, Cold Spring Harbor, N.Y. and Ausubel et al., eds., 1998, Current Protocols in Molecular Biology, John Wiley & Sons, NY, which are both incorporated by reference herein in their entireties), to generate antibodies having a different amino acid sequence, for example to create amino acid substitutions, deletions, and/or insertions.

[0446] In a specific embodiment, the amino acid sequence of the heavy and/or light chain variable domains may be inspected to identify the sequences of the complementarity determining regions (CDRs) by methods that are well know in the art, e.g., by comparison to known amino acid sequences of other heavy and light chain variable regions to determine the regions of sequence hypervariability. Using routine recombinant DNA techniques, one or more of the CDRs may be inserted within framework regions, e.g., into human framework regions to humanize a non-human antibody, as described supra. The framework regions may be naturally occurring or consensus framework regions, and preferably human framework regions (see, e.g., Chothia et al., J. Mol. Biol. 278: 457-479 (1998) for a listing of human framework regions). Preferably, the polynucleotide generated by the combination of the framework regions and CDRs encodes an antibody that specifically binds a polypeptide of the invention. Preferably, as discussed supra, one or more amino acid substitutions may be made within the framework regions, and, preferably, the amino acid substitutions improve binding of the antibody to its antigen. Additionally, such methods may be used to make amino acid substitutions or deletions of one or more variable region cysteine residues participating in an intrachain disulfide bond to generate antibody molecules lacking one or more intrachain disulfide bonds. Other alterations to the polynucleotide are encompassed by the present invention and within the skill of the art.

[0447] In addition, techniques developed for the production of “chimeric antibodies” (Morrison et al., Proc. Natl. Acad. Sci. 81:851-855 (1984); Neuberger et al., Nature 312:604-608 (1984); Takeda et al., Nature 314:452-454 (1985)) by splicing genes from a mouse antibody molecule of appropriate antigen specificity together with genes from a human antibody molecule of appropriate biological activity can be used. As described supra, a chimeric antibody is a molecule in which different portions are derived from different animal species, such as those having a variable region derived from a murine mAb and a human immunoglobulin constant region, e.g., humanized antibodies.

[0448] Alternatively, techniques described for the production of single chain antibodies (U.S. Pat. No. 4,946,778; Bird, Science 242:423-42 (1988); Huston et al., Proc. Natl. Acad. Sci. USA 85:5879-5883 (1988); and Ward et al., Nature 334:544-54 (1989)) can be adapted to produce single chain antibodies. Single chain antibodies are formed by linking the heavy and light chain fragments of the Fv region via an amino acid bridge, resulting in a single chain polypeptide. Techniques for the assembly of functional Fv fragments in E. coli may also be used (Skerra et al., Science 242:1038-1041 (1988)).

Methods of Producing Antibodies

[0449] The antibodies of the invention can be produced by any method known in the art for the synthesis of antibodies, in particular, by chemical synthesis or preferably, by recombinant expression techniques. Methods of producing antibodies include, but are not limited to, hybridoma technology, EBV transformation, and other methods discussed herein as well as through the use recombinant DNA technology, as discussed below.

[0450] Recombinant expression of an antibody of the invention, or fragment, derivative or analog thereof, (e.g., a heavy or light chain of an antibody of the invention or a single chain antibody of the invention), requires construction of an expression vector containing a polynucleotide that encodes the antibody. Once a polynucleotide encoding an antibody molecule or a heavy or light chain of an antibody, or portion thereof (preferably containing the heavy or light chain variable domain), of the invention has been obtained, the vector for the production of the antibody molecule may be produced by recombinant DNA technology using techniques well known in the art. Thus, methods for preparing a protein by expressing a polynucleotide containing an antibody encoding nucleotide sequence are described herein. Methods which are well known to those skilled in the art can be used to construct expression vectors containing antibody coding sequences and appropriate transcriptional and translational control signals. These methods include, for example, in vitro recombinant DNA techniques, synthetic techniques, and in vivo genetic recombination. The invention, thus, provides replicable vectors comprising a nucleotide sequence encoding an antibody molecule of the invention, or a heavy or light chain thereof, or a heavy or light chain variable domain, operably linked to a promoter. Such vectors may include the nucleotide sequence encoding the constant region of the antibody molecule (see, e.g., PCT Publication WO 86/05807; PCT Publication WO 89/01036; and U.S. Pat. No. 5,122,464) and the variable domain of the antibody may be cloned into such a vector for expression of the entire heavy or light chain.

[0451] The expression vector is transferred to a host cell by conventional techniques and the transfected cells are then cultured by conventional techniques to produce an antibody of the invention. Thus, the invention includes host cells containing a polynucleotide encoding an antibody of the invention, or a heavy or light chain thereof, or a single chain antibody of the invention, operably linked to a heterologous promoter. In preferred embodiments for the expression of double-chained antibodies, vectors encoding both the heavy and light chains may be co-expressed in the host cell for expression of the entire immunoglobulin molecule, as detailed below.

[0452] A variety of host-expression vector systems may be utilized to express the antibody molecules of the invention. Such host-expression systems represent vehicles by which the coding sequences of interest may be produced and subsequently purified, but also represent cells which may, when transformed or transfected with the appropriate nucleotide coding sequences, express an antibody molecule of the invention in situ. These include but are not limited to microorganisms such as bacteria (e.g., E. coli, B. subtilis) transformed with recombinant bacteriophage DNA, plasmid DNA or cosmid DNA expression vectors containing antibody coding sequences; yeast (e.g., Saccharomyces, Pichia) transformed with recombinant yeast expression vectors containing antibody coding sequences; insect cell systems infected with recombinant virus expression vectors (e.g., baculovirus) containing antibody coding sequences; plant cell systems infected with recombinant virus expression vectors (e.g., cauliflower mosaic virus, CaMV; tobacco mosaic virus, TMV) or transformed with recombinant plasmid expression vectors (e.g., Ti plasmid) containing antibody coding sequences; or mammalian cell systems (e.g., COS, CHO, BHK, 293, 3T3 cells) harboring recombinant expression constructs containing promoters derived from the genome of mammalian cells (e.g., metallothionein promoter) or from mammalian viruses (e.g., the adenovirus late promoter; the vaccinia virus 7.5K promoter). Preferably, bacterial cells such as Escherichia coli, and more preferably, eukaryotic cells, especially for the expression of whole recombinant antibody molecule, are used for the expression of a recombinant antibody molecule. For example, mammalian cells such as Chinese hamster ovary cells (CHO), in conjunction with a vector such as the major intermediate early gene promoter element from human cytomegalovirus is an effective expression system for antibodies (Foecking et al., Gene 45:101 (1986); Cockett et al., Bio/Technology 8:2 (1990)).

[0453] In bacterial systems, a number of expression vectors may be advantageously selected depending upon the use intended for the antibody molecule being expressed. For example, when a large quantity of such a protein is to be produced, for the generation of pharmaceutical compositions of an antibody molecule, vectors which direct the expression of high levels of fusion protein products that are readily purified may be desirable. Such vectors include, but are not limited, to the E. coli expression vector pUR278 (Ruther et al., EMBO J. 2:1791 (1983)), in which the antibody coding sequence may be ligated individually into the vector in frame with the lac Z coding region so that a fusion protein is produced; pIN vectors (Inouye & Inouye, Nucleic Acids Res. 13:3101-3109 (1985); Van Heeke & Schuster, J. Biol. Chem. 24:5503-5509 (1989)); and the like. pGEX vectors may also be used to express foreign polypeptides as fusion proteins with glutathione S-transferase (GST). In general, such fusion proteins are soluble and can easily be purified from lysed cells by adsorption and binding to matrix glutathione-agarose beads followed by elution in the presence of free glutathione. The pGEX vectors are designed to include thrombin or factor Xa protease cleavage sites so that the cloned target gene product can be released from the GST moiety.

[0454] In an insect system, Autographa califomica nuclear polyhedrosis virus (AcNPV) is used as a vector to express foreign genes. The virus grows in Spodoptera frugiperda cells. The antibody coding sequence may be cloned individually into non-essential regions (for example the polyhedrin gene) of the virus and placed under control of an AcNPV promoter (for example the polyhedrin promoter).

[0455] In mammalian host cells, a number of viral-based expression systems may be utilized. In cases where an adenovirus is used as an expression vector, the antibody coding sequence of interest may be ligated to an adenovirus transcription/translation control complex, e.g., the late promoter and tripartite leader sequence. This chimeric gene may then be inserted in the adenovirus genome by in vitro or in vivo recombination. Insertion in a non-essential region of the viral genome (e.g., region E1 or E3) will result in a recombinant virus that is viable and capable of expressing the antibody molecule in infected hosts. (e.g., see Logan & Shenk, Proc. Natl. Acad. Sci. USA 81:355-359 (1984)). Specific initiation signals may also be required for efficient translation of inserted antibody coding sequences. These signals include the ATG initiation codon and adjacent sequences. Furthermore, the initiation codon must be in phase with the reading frame of the desired coding sequence to ensure translation of the entire insert. These exogenous translational control signals and initiation codons can be of a variety of origins, both natural and synthetic. The efficiency of expression may be enhanced by the inclusion of appropriate transcription enhancer elements, transcription terminators, etc. (see Bittner et al., Methods in Enzymol. 153:51-544 (1987)).

[0456] In addition, a host cell strain may be chosen which modulates the expression of the inserted sequences, or modifies and processes the gene product in the specific fashion desired. Such modifications (e.g., glycosylation) and processing (e.g., cleavage) of protein products may be important for the function of the protein. Different host cells have characteristic and specific mechanisms for the post-translational processing and modification of proteins and gene products. Appropriate cell lines or host systems can be chosen to ensure the correct modification and processing of the foreign protein expressed. To this end, eukaryotic host cells which possess the cellular machinery for proper processing of the primary transcript, glycosylation, and phosphorylation of the gene product may be used. Such mammalian host cells include but are not limited to CHO, VERY, BHK, Hela, COS, MDCK, 293, 3T3, WI38, and in particular, breast cancer cell lines such as, for example, BT483, Hs578T, HTB2, BT20 and T47D, and normal mammary gland cell line such as, for example, CRL7030 and Hs578Bst.

[0457] For long-term, high-yield production of recombinant proteins, stable expression is preferred. For example, cell lines which stably express the antibody molecule may be engineered. Rather than using expression vectors which contain viral origins of replication, host cells can be transformed with DNA controlled by appropriate expression control elements (e.g., promoter, enhancer, sequences, transcription terminators, polyadenylation sites, etc.), and a selectable marker. Following the introduction of the foreign DNA, engineered cells may be allowed to grow for 1-2 days in an enriched media, and then are switched to a selective media. The selectable marker in the recombinant plasmid confers resistance to the selection and allows cells to stably integrate the plasmid into their chromosomes and grow to form foci which in turn can be cloned and expanded into cell lines. This method may advantageously be used to engineer cell lines which express the antibody molecule. Such engineered cell lines may be particularly useful in screening and evaluation of compounds that interact directly or indirectly with the antibody molecule.

[0458] A number of selection systems may be used, including but not limited to the herpes simplex virus thymidine kinase (Wigler et al., Cell 11:223 (1977)), hypoxanthine-guanine phosphoribosyltransferase (Szybalska & Szybalski, Proc. Natl. Acad. Sci. USA 48:202 (1992)), and adenine phosphoribosyltransferase (Lowy et al., Cell 22:817 (1980)) genes can be employed in tk-, hgprt- or aprt-cells, respectively. Also, antimetabolite resistance can be used as the basis of selection for the following genes: dhfr, which confers resistance to methotrexate (Wigler et al., Natl. Acad. Sci. USA 77:357 (1980); O'Hare et al., Proc. Natl. Acad. Sci. USA 78:1527 (1981)); gpt, which confers resistance to mycophenolic acid (Mulligan & Berg, Proc. Natl. Acad. Sci. USA 78:2072 (1981)); neo, which confers resistance to the aminoglycoside G418 Clinical Pharmacy 12:488-505; Wu and Wu, Biotherapy 3:87-95 (1991); Tolstoshev, Ann. Rev. Pharmacol. Toxicol. 32:573-596 (1993); Mulligan, Science 260:926-932 (1993); and Morgan and Anderson, Ann. Rev. Biochem. 62:191-217 (1993); May, 1993, TIB TECH 11(5):155-215 (1993)); and hygro, which confers resistance to hygromycin (Santerre et al., Gene 30:147 (1984)). Methods commonly known in the art of recombinant DNA technology may be routinely applied to select the desired recombinant clone, and such methods are described, for example, in Ausubel et al. (eds.), Current Protocols in Molecular Biology, John Wiley & Sons, NY (1993); Kriegler, Gene Transfer and Expression, A Laboratory Manual, Stockton Press, NY (1990); and in Chapters 12 and 13, Dracopoli et al. (eds), Current Protocols in Human Genetics, John Wiley & Sons, NY (1994); Colberre-Garapin et al., J. Mol. Biol. 150:1 (1981), which are incorporated by reference herein in their entireties.

[0459] The expression levels of an antibody molecule can be increased by vector amplification (for a review, see Bebbington and Hentschel, The use of vectors based on gene amplification for the expression of cloned genes in mammalian cells in DNA cloning, Vol.3. (Academic Press, New York, 1987)). When a marker in the vector system expressing antibody is amplifiable, increase in the level of inhibitor present in culture of host cell will increase the number of copies of the marker gene. Since the amplified region is associated with the antibody gene, production of the antibody will also increase (Crouse et al., Mol. Cell. Biol. 3:257 (1983)).

[0460] Vectors which use glutamine synthase (GS) or DHFR as the selectable markers can be amplified in the presence of the drugs methionine sulphoximine or methotrexate, respectively. An advantage of glutamine synthase based vectors are the availabilty of cell lines (e.g., the murine myeloma cell line, NSO) which are glutamine synthase negative. Glutamine synthase expression systems can also function in glutamine synthase expressing cells (e.g. Chinese Hamster Ovary (CHO) cells) by providing additional inhibitor to prevent the functioning of the endogenous gene. A glutamine synthase expression system and components thereof are detailed in PCT publications: WO87/04462; WO86/05807; WO89/01036; WO89/10404; and WO91/06657 which are incorporated in their entireties by reference herein. Additionally, glutamine synthase expression vectors that may be used according to the present invention are commercially available from suplliers, including, for example Lonza Biologics, Inc. (Portsmouth, N.H.). Expression and production of monoclonal antibodies using a GS expression system in murine myeloma cells is described in Bebbington et al., Bio/technology 10:169(1992) and in Biblia and Robinson Biotechnol. Prog. 11: 1 (1995) which are incorporated in their entirities by reference herein.

[0461] The host cell may be co-transfected with two expression vectors of the invention, the first vector encoding a heavy chain derived polypeptide and the second vector encoding a light chain derived polypeptide. The two vectors may contain identical selectable markers which enable equal expression of heavy and light chain polypeptides. Alternatively, a single vector may be used which encodes, and is capable of expressing, both heavy and light chain polypeptides. In such situations, the light chain should be placed before the heavy chain to avoid an excess of toxic free heavy chain (Proudfoot, Nature 322:52 (1986); Kohler, Proc. Natl. Acad. Sci. USA 77:2197 (1980)). The coding sequences for the heavy and light chains may comprise cDNA or genomic DNA.

[0462] Once an antibody molecule of the invention has been produced by an animal, chemically synthesized, or recombinantly expressed, it may be purified by any method known in the art for purification of an immunoglobulin molecule, for example, by chromatography (e.g., ion exchange, affinity, particularly by affinity for the specific antigen after Protein A, and sizing column chromatography), centrifugation, differential solubility, or by any other standard technique for the purification of proteins. In addition, the antibodies of the present invention or fragments thereof can be fused to heterologous polypeptide sequences described herein or otherwise known in the art, to facilitate purification.

[0463] The present invention encompasses antibodies recombinantly fused or chemically conjugated (including both covalently and non-covalently conjugations) to a polypeptide (or portion thereof, preferably at least 10, 20, 30, 40, 50, 60, 70, 80, 90 or 100 amino acids of the polypeptide) of the present invention to generate fusion proteins. The fusion does not necessarily need to be direct, but may occur through linker sequences. The antibodies may be specific for antigens other than polypeptides (or portion thereof, preferably at least 10, 20, 30, 40, 50, 60, 70, 80, 90 or 100 amino acids of the polypeptide) of the present invention. For example, antibodies may be used to target the polypeptides of the present invention to particular cell types, either in vitro or in vivo, by fusing or conjugating the polypeptides of the present invention to antibodies specific for particular cell surface receptors. Antibodies fused or conjugated to the polypeptides of the present invention may also be used in in vitro immunoassays and purification methods using methods known in the art. See e.g., Harbor et al., supra, and PCT publication WO 93/21232; EP 439,095; Naramura et al., Immunol. Lett. 39:91-99 (1994); U.S. Pat. No. 5,474,981; Gillies et al., PNAS 89:1428-1432 (1992); Fell et al., J. Immunol. 146:2446-2452 (1991), which are incorporated by reference in their entireties.

[0464] The present invention further includes compositions comprising the polypeptides of the present invention fused or conjugated to antibody domains other than the variable regions. For example, the polypeptides of the present invention may be fused or conjugated to an antibody Fc region, or portion thereof. The antibody portion fused to a polypeptide of the present invention may comprise the constant region, hinge region, CH1 domain, CH2 domain, and CH3 domain or any combination of whole domains or portions thereof. The polypeptides may also be fused or conjugated to the above antibody portions to form multimers. For example, Fc portions fused to the polypeptides of the present invention can form dimers through disulfide bonding between the Fc portions. Higher multimeric forms can be made by fusing the polypeptides to portions of IgA and IgM. Methods for fusing or conjugating the polypeptides of the present invention to antibody portions are known in the art. See, e.g., U.S. Pat. Nos. 5,336,603; 5,622,929; 5,359,046; 5,349,053; 5,447,851; 5,112,946; EP 307,434; EP 367,166; PCT publications WO 96/04388; WO 91/06570; Ashkenazi et al., Proc. Natl. Acad. Sci. USA 88:10535-10539 (1991); Zheng et al., J. Immunol. 154:5590-5600 (1995); and Vil et al., Proc. Natl. Acad. Sci. USA 89:11337-11341 (1992) (said references incorporated by reference in their entireties).

[0465] As discussed, supra, the polypeptides corresponding to a polypeptide, polypeptide fragment, or a variant of SEQ ID NO:Y may be fused or conjugated to the above antibody portions to increase the in vivo half life of the polypeptides or for use in immunoassays using methods known in the art. Further, the polypeptides corresponding to SEQ ID NO:Y may be fused or conjugated to the above antibody portions to facilitate purification. One reported example describes chimeric proteins consisting of the first two domains of the human CD4-polypeptide and various domains of the constant regions of the heavy or light chains of mammalian immunoglobulins. See EP 394,827; and Traunecker et al., Nature 331:84-86 (1988). The polypeptides of the present invention fused or conjugated to an antibody having disulfide-linked dimeric structures (due to the IgG) may also be more efficient in binding and neutralizing other molecules, than the monomeric secreted protein or protein fragment alone. See, for example, Fountoulakis et al., J. Biochem. 270:3958-3964 (1995). In many cases, the Fc part in a fusion protein is beneficial in therapy and diagnosis, and thus can result in, for example, improved pharmacokinetic properties. See, for example, EP A 232,262. Alternatively, deleting the Fc part after the fusion protein has been expressed, detected, and purified, would be desired. For example, the Fc portion may hinder therapy and diagnosis if the fusion protein is used as an antigen for immunizations. In drug discovery, for example, human proteins, such as hIL-5, have been fused with Fc portions for the purpose of high-throughput screening assays to identify antagonists of hIL-5. (See, Bennett et al., J. Molecular Recognition 8:52-58 (1995); Johanson et al., J. Biol. Chem. 270:9459-9471 (1995)).

[0466] Moreover, the antibodies or fragments thereof of the present invention can be fused to marker sequences, such as a peptide to facilitate purification. In preferred embodiments, the marker amino acid sequence is a hexa-histidine peptide, such as the tag provided in a pQE vector (QIAGEN, Inc., 9259 Eton Avenue, Chatsworth, Calif., 91311), among others, many of which are commercially available. As described in Gentz et al., Proc. Natl. Acad. Sci. USA 86:821-824 (1989), for instance, hexa-histidine provides for convenient purification of the fusion protein. Other peptide tags useful for purification include, but are not limited to, the “HA” tag, which corresponds to an epitope derived from the influenza hemagglutinin protein (Wilson et al., Cell 37:767 (1984)) and the “flag” tag.

[0467] The present invention further encompasses antibodies or fragments thereof conjugated to a diagnostic or therapeutic agent. The antibodies can be used diagnostically to, for example, monitor the development or progression of a tumor as part of a clinical testing procedure to, e.g., determine the efficacy of a given treatment regimen. Detection can be facilitated by coupling the antibody to a detectable substance. Examples of detectable substances include various enzymes, prosthetic groups, fluorescent materials, luminescent materials, bioluminescent materials, radioactive materials, positron emitting metals using various positron emission tomographies, and nonradioactive paramagnetic metal ions. The detectable substance may be coupled or conjugated either directly to the antibody (or fragment thereof) or indirectly, through an intermediate (such as, for example, a linker known in the art) using techniques known in the art. See, for example, U.S. Pat. No. 4,741,900 for metal ions which can be conjugated to antibodies for use as diagnostics according to the present invention. Examples of suitable enzymes include horseradish peroxidase, alkaline phosphatase, beta-galactosidase, or acetylcholinesterase; examples of suitable prosthetic group complexes include streptavidin/biotin and avidin/biotin; examples of suitable fluorescent materials include umbelliferone, fluorescein, fluorescein isothiocyanate, rhodamine, dichlorotriazinylamine fluorescein, dansyl chloride or phycoerythrin; an example of a luminescent material includes luminol; examples of bioluminescent materials include luciferase, luciferin, and aequorin; and examples of suitable radioactive material include 125I, 131I, 111In or 99Tc.

[0468] Further, an antibody or fragment thereof may be conjugated to a therapeutic moiety such as a cytotoxin, e.g., a cytostatic or cytocidal agent, a therapeutic agent or a radioactive metal ion, e.g., alpha-emitters such as, for example, 213Bi. A cytotoxin or cytotoxic agent includes any agent that is detrimental to cells. Examples include paclitaxol, cytochalasin B, gramicidin D, ethidium bromide, emetine, mitomycin, etoposide, tenoposide, vincristine, vinblastine, colchicin, doxorubicin, daunorubicin, dihydroxy anthracin dione, mitoxantrone, mithramycin, actinomycin D, 1-dehydrotestosterone, glucocorticoids, procaine, tetracaine, lidocaine, propranolol, and puromycin and analogs or homologs thereof. Therapeutic agents include, but are not limited to, antimetabolites (e.g., methotrexate, 6-mercaptopurine, 6-thioguanine, cytarabine, 5-fluorouracil decarbazine), alkylating agents (e.g., mechlorethamine, thioepa chlorambucil, melphalan, carmustine (BSNU) and lomustine (CCNU), cyclothosphamide, busulfan, dibromomannitol, streptozotocin, mitomycin C, and cis-dichlorodiamine platinum (II) (DDP) cisplatin), anthracyclines (e.g., daunorubicin (formerly daunomycin) and doxorubicin), antibiotics (e.g., dactinomycin (formerly actinomycin), bleomycin, mithramycin, and anthramycin (AMC)), and anti-mitotic agents (e.g., vincristine and vinblastine).

[0469] The conjugates of the invention can be used for modifying a given biological response, the therapeutic agent or drug moiety is not to be construed as limited to classical chemical therapeutic agents. For example, the drug moiety may be a protein or polypeptide possessing a desired biological activity. Such proteins may include, for example, a toxin such as abrin, ricin A, pseudomonas exotoxin, or diphtheria toxin; a protein such as tumor necrosis factor, a-interferon, β-interferon, nerve growth factor, platelet derived growth factor, tissue plasminogen activator, an apoptotic agent, e.g., TNF-alpha, TNF-beta, AIM I (See, International Publication No. WO 97/33899), AIM II (See, International Publication No. WO 97/34911), Fas Ligand (Takahashi et al., Int. Immunol., 6:1567-1574 (1994)), VEGI (See, International Publication No. WO 99/23105), a thrombotic agent or an anti-angiogenic agent, e.g., angiostatin or endostatin; or, biological response modifiers such as, for example, lymphokines, interleukin-1 (“IL-1”), interleukin-2 (“IL-2”), interleukin-6 (“IL-6”), granulocyte macrophage colony stimulating factor (“GM-CSF”), granulocyte colony stimulating factor (“G-CSF”), or other growth factors.

[0470] Antibodies may also be attached to solid supports, which are particularly useful for immunoassays or purification of the target antigen. Such solid supports include, but are not limited to, glass, cellulose, polyacrylamide, nylon, polystyrene, polyvinyl chloride or polypropylene.

[0471] Techniques for conjugating such therapeutic moiety to antibodies are well known. See, for example, Arnon et al., “Monoclonal Antibodies For Immunotargeting Of Drugs In Cancer Therapy”, in Monoclonal Antibodies And Cancer Therapy, Reisfeld et al. (eds.), pp. 243-56 (Alan R. Liss, Inc. 1985); Hellstrom et al., “Antibodies For Drug Delivery”, in Controlled Drug Delivery (2nd Ed.), Robinson et al. (eds.), pp. 623-53 (Marcel Dekker, Inc. 1987); Thorpe, “Antibody Carriers Of Cytotoxic Agents In Cancer Therapy: A Review”, in Monoclonal Antibodies '84: Biological And Clinical Applications, Pinchera et al. (eds.), pp. 475-506 (1985); “Analysis, Results, And Future Prospective Of The Therapeutic Use Of Radiolabeled Antibody In Cancer Therapy”, in Monoclonal Antibodies For Cancer Detection And Therapy, Baldwin et al. (eds.), pp. 303-16 (Academic Press 1985), and Thorpe et al., “The Preparation And Cytotoxic Properties Of Antibody-Toxin Conjugates”, Immunol. Rev. 62:119-58 (1982).

[0472] Alternatively, an antibody can be conjugated to a second antibody to form an antibody heteroconjugate as described by Segal in U.S. Pat. No. 4,676,980, which is incorporated herein by reference in its entirety.

[0473] An antibody, with or without a therapeutic moiety conjugated to it, administered alone or in combination with cytotoxic factor(s) and/or cytokine(s) can be used as a therapeutic.

Immunophenotypine

[0474] The antibodies of the invention may be utilized for immunophenotyping of cell lines and biological samples. Translation products of the gene of the present invention may be useful as cell-specific markers, or more specifically as cellular markers that are differentially expressed at various stages of differentiation and/or maturation of particular cell types. Monoclonal antibodies directed against a specific epitope, or combination of epitopes, will allow for the screening of cellular populations expressing the marker. Various techniques can be utilized using monoclonal antibodies to screen for cellular populations expressing the marker(s), and include magnetic separation using antibody-coated magnetic beads, “panning” with antibody attached to a solid matrix (i.e., plate), and flow cytometry (See, e.g., U.S. Pat. No. 5,985,660; and Morrison et al., Cell, 96:737-49 (1999)).

[0475] These techniques allow for the screening of particular populations of cells, such as might be found with hematological malignancies (i.e. minimal residual disease (MRD) in acute leukemic patients) and “non-self” cells in transplantations to prevent Graft-versus-Host Disease (GVHD). Alternatively, these techniques allow for the screening of hematopoietic stem and progenitor cells capable of undergoing proliferation and/or differentiation, as might be found in human umbilical cord blood.

Assays For Antibody Binding

[0476] The antibodies of the invention may be assayed for immunospecific binding by any method known in the art. The immunoassays which can be used include but are not limited to competitive and non-competitive assay systems using techniques such as western blots, radioimmunoassays, ELISA (enzyme linked immunosorbent assay), “sandwich” immunoassays, immunoprecipitation assays, precipitin reactions, gel diffusion precipitin reactions, immunodiffusion assays, agglutination assays, complement-fixation assays, immunoradiometric assays, fluorescent immunoassays, and protein A immunoassays, to name but a few. Such assays are routine and well known in the art (see, e.g., Ausubel et al., eds, 1994, Current Protocols in Molecular Biology, Vol. 1, John Wiley & Sons, Inc., New York, which is incorporated by reference herein in its entirety). Exemplary immunoassays are described briefly below (but are not intended by way of limitation).

[0477] Immunoprecipitation protocols generally comprise lysing a population of cells in a lysis buffer such as RIPA buffer (1% NP-40 or Triton X-100, 1% sodium deoxycholate, 0.1% SDS, 0.15 M NaCl, 0.01 M sodium phosphate at pH 7.2, 1% Trasylol) supplemented with protein phosphatase and/or protease inhibitors (e.g., EDTA, PMSF, aprotinin, sodium vanadate), adding the antibody of interest to the cell lysate, incubating for a period of time (e.g., 1-4 hours) at 4° C., adding protein A and/or protein G sepharose beads to the cell lysate, incubating for about an hour or more at 4° C., washing the beads in lysis buffer and resuspending the beads in SDS/sample buffer. The ability of the antibody of interest to immunoprecipitate a particular antigen can be assessed by, e.g., western blot analysis. One of skill in the art would be knowledgeable as to the parameters that can be modified to increase the binding of the antibody to an antigen and decrease the background (e.g., pre-clearing the cell lysate with sepharose beads). For further discussion regarding immunoprecipitation protocols see, e.g., Ausubel et al., eds., (1994), Current Protocols in Molecular Biology, Vol. 1, John Wiley & Sons, Inc., New York, section 10.16.1.

[0478] Western blot analysis generally comprises preparing protein samples, electrophoresis of the protein samples in a polyacrylamide gel (e.g., 8%-20% SDS-PAGE depending on the molecular weight of the antigen), transferring the protein sample from the polyacrylamide gel to a membrane such as nitrocellulose, PVDF or nylon, blocking the membrane in blocking solution (e.g., PBS with 3% BSA or non-fat milk), washing the membrane in washing buffer (e.g., PBS-Tween 20), blocking the membrane with primary antibody (the antibody of interest) diluted in blocking buffer, washing the membrane in washing buffer, blocking the membrane with a secondary antibody (which recognizes the primary antibody, e.g., an anti-human antibody) conjugated to an enzymatic substrate (e.g., horseradish peroxidase or alkaline phosphatase) or radioactive molecule (e.g., 32P or 125I) diluted in blocking buffer, washing the membrane in wash buffer, and detecting the presence of the antigen. One of skill in the art would be knowledgeable as to the parameters that can be modified to increase the signal detected and to reduce the background noise. For further discussion regarding western blot protocols see, e.g., Ausubel et al., eds, (1994), Current Protocols in Molecular Biology, Vol. 1, John Wiley & Sons, Inc., New York, section 10.8.1.

[0479] ELISAs comprise preparing antigen, coating the well of a 96 well microtiter plate with the antigen, adding the antibody of interest conjugated to a detectable compound such as an enzymatic substrate (e.g., horseradish peroxidase or alkaline phosphatase) to the well and incubating for a period of time, and detecting the presence of the antigen. In ELISAs the antibody of interest does not have to be conjugated to a detectable compound; instead, a second antibody (which recognizes the antibody of interest) conjugated to a detectable compound may be added to the well. Further, instead of coating the well with the antigen, the antibody may be coated to the well. In this case, a second antibody conjugated to a detectable compound may be added following the addition of the antigen of interest to the coated well. One of skill in the art would be knowledgeable as to the parameters that can be modified to increase the signal detected as well as other variations of ELISAs known in the art. For further discussion regarding ELISAs see, e.g., Ausubel et al., eds, (1994), Current Protocols in Molecular Biology, Vol. 1, John Wiley & Sons, Inc., New York, section 11.2.1.

[0480] The binding affinity of an antibody to an antigen and the off-rate of an antibody-antigen interaction can be determined by competitive binding assays. One example of a competitive binding assay is a radioimmunoassay comprising the incubation of labeled antigen (e.g., 3H or 125I) with the antibody of interest in the presence of increasing amounts of unlabeled antigen, and the detection of the antibody bound to the labeled antigen. The affinity of the antibody of interest for a particular antigen and the binding off-rates can be determined from the data by scatchard plot analysis. Competition with a second antibody can also be determined using radioimmunoassays. In this case, the antigen is incubated with antibody of interest conjugated to a labeled compound (e.g., 3H or 125I) in the presence of increasing amounts of an unlabeled second antibody.

[0481] Antibodies of the invention may be characterized using immunocytochemisty methods on cells (e.g., mammalian cells, such as CHO cells) transfected with a vector enabling the expression of an antigen or with vector alone using techniques commonly known in the art. Antibodies that bind antigen transfected cells, but not vector-only transfected cells, are antigen specific.

Therapeutic Uses

[0482] Table 1C: In preferred embodiments, the present invention encompasses a method of treating a disease or disorder listed in the “Preferred Indications” column of Table 1C; comprising administering to a patient in which such treatment, prevention, or amelioration is desired a protein, nucleic acid, or antibody of the invention (or fragment or variant thereof) represented by Table 1A and Table 1C (in the same row as the disease or disorder to be treated is listed in the “Preferred Indications” column of Table 1C) in an amount effective to treat, prevent, or ameliorate the disease or disorder.

[0483] As indicated in Table 1C, the polynucleotides, polypeptides, agonists, or antagonists of the present invention (including antibodies) can be used in assays to test for one or more biological activities. If these polynucleotides and polypeptides do exhibit activity in a particular assay, it is likely that these molecules may be involved in the diseases associated with the biological activity. Thus, the polynucleotides or polypeptides, or agonists or antagonists thereof (including antibodies) could be used to treat the associated disease.

[0484] The present invention encompasses methods of preventing, treating, diagnosing, or ameliorating a disease or disorder. In preferred embodiments, the present invention encompasses a method of treating a disease or disorder listed in the “Preferred Indications” column of Table 1C; comprising administering to a patient in which such treatment, prevention, or amelioration is desired a protein, nucleic acid, or antibody of the invention (or fragment or variant thereof) in an amount effective to treat, prevent, diagnose, or ameliorate the disease or disorder. The first and seccond columns of Table 1C show the “Gene No.” and “cDNA Clone ID No.”, respectively, indicating certain nucleic acids and proteins (or antibodies against the same) of the invention (including polynucleotide, polypeptide, and antibody fragments or variants thereof) that may be used in preventing, treating, diagnosing, or ameliorating the disease(s) or disorder(s) indicated in the corresponding row in Column 3 of Table 1C.

[0485] In another embodiment, the present invention also encompasses methods of preventing, treating, diagnosing, or ameliorating a disease or disorder listed in the “Preferred Indications” column of Table 1C; comprising administering to a patient combinations of the proteins, nucleic acids, or antibodies of the invention (or fragments or variants thereof), sharing similar indications as shown in the corresponding rows in Column 3 of Table 1C.

[0486] The “Preferred Indication” column describes diseases, disorders, and/or conditions that may be treated, prevented, diagnosed, or ameliorated by a protein, nucleic acid, or antibody of the invention (or fragment or variant thereof).

[0487] The recitation of “Cancer” in the “Preferred Indication” column indicates that the corresponding nucleic acid and protein, or antibody against the same, of the invention (or fragment or variant thereof) may be used for example, to diagnose, treat, prevent, and/or ameliorate diseases and/or disorders relating to neoplastic diseases (e.g., leukemias, cancers, and/or as described below under “Hyperproliferative Disorders”).

[0488] In specific embodiments, a protein, nucleic acid, or antibody of the invention (or fragment or variant thereof) having a “Cancer” recitation in the “Preferred Indication” column of Table 1C may be used for example, to diagnose, treat, prevent, and/or ameliorate a neoplasm located in a tissue selected from the group consisting of: colon, abdomen, bone, breast, digestive system, liver, pancreas, prostate, peritoneum, lung, blood (e.g., leukemia), endocrine glands (adrenal, parathyroid, pituitary, testicles, ovary, thymus, thyroid), uterus, eye, head and neck, nervous (central and peripheral), lymphatic system, pelvic, skin, soft tissue, spleen, thoracic, and urogenital.

[0489] In specific embodiments, a protein, nucleic acid, or antibody of the invention (or fragment or variant thereof) having a “Cancer” recitation in the “Preferred Indication” column of Table 1C, may be used for example, to diagnose, treat, prevent, and/or ameliorate a pre-neoplastic condition, selected from the group consisting of: hyperplasia (e.g., endometrial hyperplasia and/or as described in the section entitled “Hyperproliferative Disorders”), metaplasia (e.g., connective tissue metaplasia, atypical metaplasia, and/or as described in the section entitled “Hyperproliferative Disorders”), and/or dysplasia (e.g., cervical dysplasia, and bronchopulmonary dysplasia).

[0490] In another specific embodiment, a protein, nucleic acid, or antibody of the invention (or fragment or variant thereof) having a “Cancer” recitation in the “Preferred Indication” column of Table 1C, may be used for example, to diagnose, treat, prevent, and/or ameliorate a benign dysproliferative disorder selected from the group consisting of: benign tumors, fibrocystic conditions, tissue hypertrophy, and/or as described in the section entitled “Hyperproliferative Disorders”.

[0491] The recitation of “lmmune/Hematopoietic” in the “Preferred Indication” column indicates that the corresponding nucleic acid and protein, or antibody against the same, of the invention (or fragment or variant thereof), may be used for example, to diagnose, treat, prevent, and/or ameliorate diseases and/or disorders relating to neoplastic diseases (e.g., as described below under “Hyperproliferative Disorders”), blood disorders (e.g., as described below under “Immune Activity” “Cardiovascular Disorders” and/or “Blood-Related Disorders”), and infections (e.g., as described below under “Infectious Disease”).

[0492] In specific embodiments, a protein, nucleic acid, or antibody of the invention (or fragment or variant thereof) having the “Immune/Hematopoietic” recitation in the “Preferred Indication” column of Table 1C, may be used for example, to diagnose, treat, prevent, and/or ameliorate a disease or disorder selected from the group consisting of: anemia, pancytopenia, leukopenia, thrombocytopenia, leukemias, Hodgkin's disease, non-Hodgkin's lymphoma, acute lymphocytic anemia (ALL), plasmacytomas, multiple myeloma, Burkitt's lymphoma, arthritis, asthma, AIDS, autoimmune disease, rheumatoid arthritis, granulomatous disease, immune deficiency, inflammatory bowel disease, sepsis, neutropenia, neutrophilia, psoriasis, immune reactions to transplanted organs and tissues, systemic lupus erythematosis, hemophilia, hypercoagulation, diabetes mellitus, endocarditis, meningitis, Lyme Disease, and allergies.

[0493] The recitation of “Reproductive” in the “Preferred Indication” column indicates that the corresponding nucleic acid and protein, or antibody against the same, of the invention (or fragment or variant thereof), may be used for example, to diagnose, treat, prevent, and/or ameliorate diseases and/or disorders relating to neoplastic diseases (e.g., as described below under “Hyperproliferative Disorders”), and disorders of the reproductive system (e.g., as described below under “Reproductive System Disorders”).

[0494] In specific embodiments, a protein, nucleic acid, or antibody of the invention (or fragment or variant thereof) having a “Reproductive” recitation in the “Preferred Indication” column of Table 1C, may be used for example, to diagnose, treat, prevent, and/or ameliorate a disease or disorder selected from the group consisting of: cryptorchism, prostatitis, inguinal hernia, varicocele, leydig cell tumors, verrucous carcinoma, prostatitis, malacoplakia, Peyronie's disease, penile carcinoma, squamous cell hyperplasia, dysmenorrhea, ovarian adenocarcinoma, Turner's syndrome, mucopurulent cervicitis, Sertoli-leydig tumors, ovarian cancer, uterine cancer, pelvic inflammatory disease, testicular cancer, prostate cancer, Klinefelter's syndrome, Young's syndrome, premature ejaculation, diabetes mellitus, cystic fibrosis, Kartagener's syndrome, testicular atrophy, testicular feminization, anorchia, ectopic testis, epididymitis, orchitis, gonorrhea, syphilis, testicular torsion, vasitis nodosa, germ cell tumors, stromal tumors, dysmenorrhea, retroverted uterus, endometriosis, fibroids, adenomyosis, anovulatory bleeding, amenorrhea, Cushing's syndrome, hydatidiform moles, Asherman's syndrome, premature menopause, precocious puberty, uterine polyps, dysfunctional uterine bleeding, cervicitis, chronic cervicitis, mucopurulent cervicitis, cervical dysplasia, cervical polyps, Nabothian cysts, cervical erosion, cervical incompetence, cervical neoplasms, pseudohermaphroditism, and premenstrual syndrome.

[0495] The recitation of “Musculoskeletal” in the “Preferred Indication” column indicates that the corresponding nucleic acid and protein, or antibody against the same, of the invention (or fragment or variant thereof), may be used for example, to diagnose, treat, prevent, and/or ameliorate diseases and/or disorders relating to neoplastic diseases (e.g., as described below under “Hyperproliferative Disorders”), and disorders of the immune system (e.g., as described below under “Immune Activity”).

[0496] In specific embodiments, a protein, nucleic acid, or antibody of the invention (or fragment or variant thereof) having a “Musculoskeletal” recitation in the “Preferred Indication” column of Table 1C, may be used for example, to diagnose, treat, prevent, and/or ameliorate a disease or disorder selected from the group consisting of: bone cancers (e.g., osteochondromas, benign chondromas, chondroblastoma, chondromyxoid fibromas, osteoid osteomas, giant cell tumors, multiple myeloma, osteosarcomas), Paget's Disease, rheumatoid arthritis, systemic lupus erythematosus, osteomyelitis, Lyme Disease, gout, bursitis, tendonitis, osteoporosis, osteoarthritis, muscular dystrophy, mitochondrial myopathy, cachexia, and multiple sclerosis.

[0497] The recitation of “Cardiovascular” in the “Preferred Indication” column indicates that the corresponding nucleic acid and protein, or antibody against the same, of the invention (or fragment or variant thereof), may be used for example, to diagnose, treat, prevent, and/or ameliorate diseases and/or disorders relating to neoplastic diseases (e.g., as described below under “Hyperproliferative Disorders”), and disorders of the cardiovascular system (e.g., as described below under “Cardiovascular Disorders”).

[0498] In specific embodiments, a protein, nucleic acid, or antibody of the invention (or fragment or variant thereof) having a “Cardiovascular” recitation in the “Preferred Indication” column of Table 1C, may be used for example, to diagnose, treat, prevent, and/or ameliorate a disease or disorder selected from the group consisting of: myxomas, fibromas, rhabdomyomas, cardiovascular abnormalities (e.g., congenital heart defects, cerebral arteriovenous malformations, septal defects), heart disease (e.g., heart failure, congestive heart disease, arrhythmia, tachycardia, fibrillation, pericardial Disease, endocarditis), cardiac arrest, heart valve disease (e.g., stenosis, regurgitation, prolapse), vascular disease (e.g., hypertension, coronary artery disease, angina, aneurysm, arteriosclerosis, peripheral vascular disease), hyponatremia, hypernatremia, hypokalemia, and hyperkalemia.

[0499] The recitation of “Mixed Fetal” in the “Preferred Indication” column indicates that the corresponding nucleic acid and protein, or antibody against the same, of the invention (or fragment or variant thereof), may be used for example, to diagnose, treat, prevent, and/or ameliorate diseases and/or disorders relating to neoplastic diseases (e.g., as described below under “Hyperproliferative Disorders”).

[0500] In specific embodiments, a protein, nucleic acid, or antibody of the invention (or fragment or variant thereof) having a “Mixed Fetal” recitation in the “Preferred Indication” column of Table 1C, may be used for example, to diagnose, treat, prevent, and/or ameliorate a disease or disorder selected from the group consisting of: spina bifida, hydranencephaly, neurofibromatosis, fetal alcohol syndrome, diabetes mellitus, PKU, Down's syndrome, Patau syndrome, Edwards syndrome, Turner syndrome, Apert syndrome, Carpenter syndrome, Conradi syndrome, Crouzon syndrome, cutis laxa, Cornelia de Lange syndrome, Ellis-van Creveld syndrome, Holt-Oram syndrome, Kartagener syndrome, Meckel-Gruber syndrome, Noonan syndrome, Pallister-Hall syndrome, Rubinstein-Taybi syndrome, Scimitar syndrome, Smith-Lemli-Opitz syndrome, thromocytopenia-absent radius (TAR) syndrome, Treacher Collins syndrome, Williams syndrome, Hirschsprung's disease, Meckel's diverticulum, polycystic kidney disease, Turner's syndrome, and gonadal dysgenesis, Klippel-Feil syndrome, Ostogenesis imperfecta, muscular dystrophy, Tay-Sachs disease, Wilm's tumor, neuroblastoma, and retinoblastoma.

[0501] The recitation of “Excretory” in the “Preferred Indication” column indicates that the corresponding nucleic acid and protein, or antibody against the same, of the invention (or fragment or variant thereof), may be used for example, to diagnose, treat, prevent, and/or ameliorate diseases and/or disorders relating to neoplastic diseases (e.g., as described below under “Hyperproliferative Disorders”) and renal disorders (e.g., as described below under “Renal Disorders”).

[0502] In specific embodiments, a protein, nucleic acid, or antibody of the invention (or fragment or variant thereof) having a “Excretory” recitation in the “Preferred Indication” column of Table 1C, may be used for example, to diagnose, treat, prevent, and/or ameliorate a disease or disorder selected from the group consisting of: bladder cancer, prostate cancer, benign prostatic hyperplasia, bladder disorders (e.g., urinary incontinence, urinary retention, urinary obstruction, urinary tract Infections, interstitial cystitis, prostatitis, neurogenic bladder, hematuria), renal disorders (e.g., hydronephrosis, proteinuria, renal failure, pyelonephritis, urolithiasis, reflux nephropathy, and unilateral obstructive uropathy).

[0503] The recitation of “Neural/Sensory” in the “Preferred Indication” column indicates that the corresponding nucleic acid and protein, or antibody against the same, of the invention (or fragment or variant thereof), may be used for example, to diagnose, treat, prevent, and/or ameliorate diseases and/or disorders relating to neoplastic diseases (e.g., as described below under “Hyperproliferative Disorders”) and diseases or disorders of the nervous system (e.g., as described below under “Neural Activity and Neurological Diseases”).

[0504] In specific embodiments, a protein, nucleic acid, or antibody of the invention (or fragment or variant thereof) having a “Neural/Sensory” recitation in the “Preferred Indication” column of Table 1C, may be used for example, to diagnose, treat, prevent, and/or ameliorate a disease or disorder selected from the group consisting of: brain cancer (e.g., brain stem glioma, brain tumors, central nervous system (Primary) lymphoma, central nervous system lymphoma, cerebellar astrocytoma, and cerebral astrocytoma, neurodegenerative disorders (e.g., Alzheimer's Disease, Creutzfeldt-Jakob Disease, Parkinson's Disease, and Idiopathic Presenile Dementia), encephalomyelitis, cerebral malaria, meningitis, metabolic brain diseases (e.g., phenylketonuria and pyruvate carboxylase deficiency), cerebellar ataxia, ataxia telangiectasia, and AIDS Dementia Complex, schizophrenia, attention deficit disorder, hyperactive attention deficit disorder, autism, and obsessive compulsive disorders.

[0505] The recitation of “Respiratory” in the “Preferred Indication” column indicates that the corresponding nucleic acid and protein, or antibody against the same, of the invention (or fragment or variant thereof), may be used for example, to diagnose, treat, prevent, and/or ameliorate diseases and/or disorders relating to neoplastic diseases (e.g., as described below under “Hyperproliferative Disorders”) and diseases or disorders of the respiratory system (e.g., as described below under “Respiratory Disorders”).

[0506] In specific embodiments, a protein, nucleic acid, or antibody of the invention (or fragment or variant thereof) having a “Respiratory” recitation in the “Preferred Indication” column of Table 1C, may be used for example, to diagnose, treat, prevent, and/or ameliorate a disease or disorder selected from the group consisting of: cancers of the respiratory system such as larynx cancer, pharynx cancer, trachea cancer, epiglottis cancer, lung cancer, squamous cell carcinomas, small cell (oat cell) carcinomas, large cell carcinomas, and adenocarcinomas. Allergic reactions, cystic fibrosis, sarcoidosis, histiocytosis X, infiltrative lung diseases (e.g., pulmonary fibrosis and lymphoid interstitial pneumonia), obstructive airway diseases (e.g., asthma, emphysema, chronic or acute bronchitis), occupational lung diseases (e.g., silicosis and asbestosis), pneumonia, and pleurisy.

[0507] The recitation of “Endocrine” in the “Preferred Indication” column indicates that the corresponding nucleic acid and protein, or antibody against the same, of the invention (or fragment or variant thereof), may be used for example, to diagnose, treat, prevent, and/or ameliorate diseases and/or disorders relating to neoplastic diseases (e.g., as described below under “Hyperproliferative Disorders”) and diseases or disorders of the respiratory system (e.g., as described below under “Respiratory Disorders”), renal disorders (e.g., as described below under “Renal Disorders”), and disorders of the endocrine system (e.g., as described below under “Endocrine Disorders”.

[0508] In specific embodiments, a protein, nucleic acid, or antibody of the invention (or fragment or variant thereof) having an “Endocrine” recitation in the “Preferred Indication” column of Table 1C, may be used for example, to diagnose, treat, prevent, and/or ameliorate a disease or disorder selected from the group consisting of: cancers of endocrine tissues and organs (e.g., cancers of the hypothalamus, pituitary gland, thyroid gland, parathyroid glands, pancreas, adrenal glands, ovaries, and testes), diabetes (e.g., diabetes insipidus, type I and type II diabetes mellitus), obesity, disorders related to pituitary glands (e.g., hyperpituitarism, hypopituitarism, and pituitary dwarfism), hypothyroidism, hyperthyroidism, goiter, reproductive disorders (e.g. male and female infertility), disorders related to adrenal glands (e.g., Addison's Disease, corticosteroid deficiency, and Cushing's Syndrome), kidney cancer (e.g., hypernephroma, transitional cell cancer, and Wilm's tumor), diabetic nephropathy, interstitial nephritis, polycystic kidney disease, glomerulonephritis (e.g., IgM mesangial proliferative glomerulonephritis and glomerulonephritis caused by autoimmune disorders; such as Goodpasture's syndrome), and nephrocalcinosis.

[0509] The recitation of “Digestive” in the “Preferred Indication” column indicates that the corresponding nucleic acid and protein, or antibody against the same, of the invention (or fragment or variant thereof), may be used for example, to diagnose, treat, prevent, and/or ameliorate diseases and/or disorders relating to neoplastic diseases (e.g., as described below under “Hyperproliferative Disorders”) and diseases or disorders of the gastrointestinal system (e.g., as described below under “Gastrointestinal Disorders”.

[0510] In specific embodiments, a protein, nucleic acid, or antibody of the invention (or fragment or variant thereof) having a “Digestive” recitation in the “Preferred Indication” column of Table 1C, may be used for example, to diagnose, treat, prevent, and/or ameliorate a disease or disorder selected from the group consisting of: ulcerative colitis, appendicitis, Crohn's disease, hepatitis, hepatic encephalopathy, portal hypertension, cholelithiasis, cancer of the digestive system (e.g., biliary tract cancer, stomach cancer, colon cancer, gastric cancer, pancreatic cancer, cancer of the bile duct, tumors of the colon (e.g., polyps or cancers), and cirrhosis), pancreatitis, ulcerative disease, pyloric stenosis, gastroenteritis, gastritis, gastric atropy, benign tumors of the duodenum, distension, irritable bowel syndrome, malabsorption, congenital disorders of the small intestine, bacterial and parasitic infection, megacolon, Hirschsprung's disease, aganglionic megacolon, acquired megacolon, colitis, anorectal disorders (e.g., anal fistulas, hemorrhoids), congenital disorders of the liver (e.g., Wilson's disease, hemochromatosis, cystic fibrosis, biliary atresia, and alphal-antitrypsin deficiency), portal hypertension, cholelithiasis, and jaundice.

[0511] The recitation of “Connective/Epithelial” in the “Preferred Indication” column indicates that the corresponding nucleic acid and protein, or antibody against the same, of the invention (or fragment or variant thereof), may be used for example, to diagnose, treat, prevent, and/or ameliorate diseases and/or disorders relating to neoplastic diseases (e.g., as described below under “Hyperproliferative Disorders”), cellular and genetic abnormalities (e.g., as described below under “Diseases at the Cellular Level ”), angiogenesis (e.g., as described below under “Anti-Angiogenesis Activity ”), and or to promote or inhibit regeneration (e.g., as described below under “Regeneration”), and wound healing (e.g., as described below under “Wound Healing and Epithelial Cell Proliferation”).

[0512] In specific embodiments, a protein, nucleic acid, or antibody of the invention (or fragment or variant thereof) having a “Connective/Epithelial” recitation in the “Preferred Indication” column of Table 1C, may be used for example, to diagnose, treat, prevent, and/or ameliorate a disease or disorder selected from the group consisting of: connective tissue metaplasia, mixed connective tissue disease, focal epithelial hyperplasia, epithelial metaplasia, mucoepithelial dysplasia, graft v. host disease, polymyositis, cystic hyperplasia, cerebral dysplasia, tissue hypertrophy, Alzheimer's disease, lymphoproliferative disorder, Waldenstron's macroglobulinemia, Crohn's disease, pernicious anemia, idiopathic Addison's disease, glomerulonephritis, bullous pemphigoid, Sjogren's syndrome, diabetes mellitus, cystic fibrosis, osteoblastoma, osteoclastoma, osteosarcoma, chondrosarcoma, osteoporosis, osteocarthritis, periodontal disease, wound healing, relapsing polychondritis, vasculitis, polyarteritis nodosa, Wegener's granulomatosis, cellulitis, rheumatoid arthritis, psoriatic arthritis, discoid lupus erythematosus, systemic lupus erythematosus, scleroderma, CREST syndrome, Sjogren's syndrome, polymyositis, dermatomyositis, mixed connective tissue disease, relapsing polychondritis, vasculitis, Henoch-Schonlein syndrome, erythema nodosum, polyarteritis nodosa, temporal (giant cell) arteritis, Takayasu's arteritis, Wegener's granulomatosis, Reiter's syndrome, Behcet's syndrome, ankylosing spondylitis, cellulitis, keloids, Ehler Danlos syndrome, Marfan syndrome, pseudoxantoma elasticum, osteogenese imperfecta, chondrodysplasias, epidermolysis bullosa, Alport syndrome, and cutis laxa.

[0513] Table 1C also provides information regarding biological activities and preferred therapeutic uses (i.e. see, “Preferred Indications” column) for polynucleotides and polypeptides of the invention (including antibodies, agonists, and/or antagonists thereof). Table 1C also provides information regarding assays which may be used to test polynucleotides and polypeptides of the invention (including antibodies, agonists, and/or antagonists thereof) for the corresponding biological activities. The first column (“Gene No.”) provides the gene number in the application for each clone identifier. The second column (“cDNA Clone ID”) provides the unique clone identifier for each clone as previously described and indicated in Tables 1A, 1B, and 1D. The third column (“AA SEQ ID NO:Y”) indicates the Sequence Listing SEQ ID Number for polypeptide sequences encoded by the corresponding cDNA clones (also as indicated in Tables 1A, 1B, and 2). The fourth column (“Biological Activity”) indicates a biological activity corresponding to the indicated polypeptides (or polynucleotides encoding said polypeptides). The fifth column (“Exemplary Activity Assay”) further describes the corresponding biological activity and also provides information pertaining to the various types of assays which may be performed to test, demonstrate, or quantify the corresponding biological activity. The sixth column (“Preferred Indications”) describes particular embodiments of the invention as well as indications (e.g. pathologies, diseases, disorders, abnormalities, etc.) for which polynucleotides and polypeptides of the invention (including antibodies, agonists, and/or antagonists thereof) may be used in detecting, diagnosing, preventing, and/or treating.

[0514] The present invention is further directed to antibody-based therapies which involve administering antibodies of the invention to an animal, preferably a mammal, and most preferably a human, patient for treating one or more of the disclosed diseases, disorders, or conditions. Therapeutic compounds of the invention include, but are not limited to, antibodies of the invention (including fragments, analogs and derivatives thereof as described herein) and nucleic acids encoding antibodies of the invention (including fragments, analogs and derivatives thereof and anti-idiotypic antibodies as described herein). The antibodies of the invention can be used to treat, inhibit or prevent diseases, disorders or conditions associated with aberrant expression and/or activity of a polypeptide of the invention, including, but not limited to, any one or more of the diseases, disorders, or conditions described herein. The treatment and/or prevention of diseases, disorders, or conditions associated with aberrant expression and/or activity of a polypeptide of the invention includes, but is not limited to, alleviating symptoms associated with those diseases, disorders or conditions. Antibodies of the invention may be provided in pharmaceutically acceptable compositions as known in the art or as described herein.

[0515] In a specific and preferred embodiment, the present invention is directed to antibody-based therapies which involve administering antibodies of the invention to an animal, preferably a mammal, and most preferably a human, patient for treating one or more diseases, disorders, or conditions, including but not limited to: neural disorders, immune system disorders, muscular disorders, reproductive disorders, gastrointestinal disorders, pulmonary disorders, cardiovascular disorders, renal disorders, proliferative disorders, and/or cancerous diseases and conditions., and/or as described elsewhere herein. Therapeutic compounds of the invention include, but are not limited to, antibodies of the invention (e.g., antibodies directed to the full length protein expressed on the cell surface of a mammalian cell; antibodies directed to an epitope of a polypeptide of the invention (such as, for example, a predicted linear epitope shown in column 7 of Table 1B; or a conformational epitope, including fragments, analogs and derivatives thereof as described herein) and nucleic acids encoding antibodies of the invention (including fragments, analogs and derivatives thereof and anti-idiotypic antibodies as described herein). The antibodies of the invention can be used to treat, inhibit or prevent diseases, disorders or conditions associated with aberrant expression and/or activity of a polypeptide of the invention, including, but not limited to, any one or more of the diseases, disorders, or conditions described herein. The treatment and/or prevention of diseases, disorders, or conditions associated with aberrant expression and/or activity of a polypeptide of the invention includes, but is not limited to, alleviating symptoms associated with those diseases, disorders or conditions. Antibodies of the invention may be provided in pharmaceutically acceptable compositions as known in the art or as described herein.

[0516] A summary of the ways in which the antibodies of the present invention may be used therapeutically includes binding polynucleotides or polypeptides of the present invention locally or systemically in the body or by direct cytotoxicity of the antibody, e.g. as mediated by complement (CDC) or by effector cells (ADCC). Some of these approaches are described in more detail below. Armed with the teachings provided herein, one of ordinary skill in the art will know how to use the antibodies of the present invention for diagnostic, monitoring or therapeutic purposes without undue experimentation.

[0517] The antibodies of this invention may be advantageously utilized in combination with other monoclonal or chimeric antibodies, or with lymphokines or hematopoietic growth factors (such as, e.g., IL-2, IL-3 and IL-7), for example, which serve to increase the number or activity of effector cells which interact with the antibodies.

[0518] The antibodies of the invention may be administered alone or in combination with other types of treatments (e.g., radiation therapy, chemotherapy, hormonal therapy, immunotherapy and anti-tumor agents). Generally, administration of products of a species origin or species reactivity (in the case of antibodies) that is the same species as that of the patient is preferred. Thus, in a preferred embodiment, human antibodies, fragments derivatives, analogs, or nucleic acids, are administered to a human patient for therapy or prophylaxis.

[0519] It is preferred to use high affinity and/or potent in vivo inhibiting and/or neutralizing antibodies against polypeptides or polynucleotides of the present invention, fragments or regions thereof, for both immunoassays directed to and therapy of disorders related to polynucleotides or polypeptides, including fragments thereof, of the present invention. Such antibodies, fragments, or regions, will preferably have an affinity for polynucleotides or polypeptides of the invention, including fragments thereof. Preferred binding affinities include those with a dissociation constant or Kd less than 5×10⁻² M, 10⁻² M, 5×10⁻³ M, 10⁻³M, 5×10⁻⁴ M, 10⁻⁴M, 5×10⁻⁵ M, 10⁻⁵ M, 5×10⁻⁶ M, 10⁻⁶ M, 5×10⁻⁷ M, 10⁻⁷ M, 5×10⁻⁸ M, 10⁻⁸ M, 5×10⁻⁹ M, 10⁻⁹ M, 5×10⁻¹⁰ M, 10⁻¹⁰ M, 5×10⁻¹¹ M, 10⁻¹¹ M, 5×10⁻¹² M, 10⁻¹² M, 5×10⁻¹³ M, 10⁻¹³ M, 5×10⁻¹⁴ M, 10⁻¹⁴ M, 5×10⁻¹⁵ M, 10⁻¹⁵ M.

Gene Therapy

[0520] In a specific embodiment, nucleic acids comprising sequences encoding antibodies or functional derivatives thereof, are administered to treat, inhibit or prevent a disease or disorder associated with aberrant expression and/or activity of a polypeptide of the invention, by way of gene therapy. Gene therapy refers to therapy performed by the administration to a subject of an expressed or expressible nucleic acid. In this embodiment of the invention, the nucleic acids produce their encoded protein that mediates a therapeutic effect.

[0521] Any of the methods for gene therapy available in the art can be used according to the present invention. Exemplary methods are described below.

[0522] For general reviews of the methods of gene therapy, see Goldspiel et al., Clinical Pharmacy 12:488-505 (1993); Wu and Wu, Biotherapy 3:87-95 (1991); Tolstoshev, Ann. Rev. Pharmacol. Toxicol. 32:573-596 (1993); Mulligan, Science 260:926-932 (1993); and Morgan and Anderson, Ann. Rev. Biochem. 62:191-217 (1993); May, TIBTECH 11(5):155-215 (1993). Methods commonly known in the art of recombinant DNA technology which can be used are described in Ausubel et al. (eds.), Current Protocols in Molecular Biology, John Wiley & Sons, NY (1993); and Kriegler, Gene Transfer and Expression, A Laboratory Manual, Stockton Press, NY (1990).

[0523] In a preferred embodiment, the compound comprises nucleic acid sequences encoding an antibody, said nucleic acid sequences being part of expression vectors that express the antibody or fragments or chimeric proteins or heavy or light chains thereof in a suitable host. In particular, such nucleic acid sequences have promoters operably linked to the antibody coding region, said promoter being inducible or constitutive, and, optionally, tissue-specific. In another particular embodiment, nucleic acid molecules are used in which the antibody coding sequences and any other desired sequences are flanked by regions that promote homologous recombination at a desired site in the genome, thus providing for intrachromosomal expression of the antibody encoding nucleic acids (Koller and Smithies, Proc. Natl. Acad. Sci. USA 86:8932-8935 (1989); Zijlstra et al., Nature 342:435-438 (1989). In specific embodiments, the expressed antibody molecule is a single chain antibody; alternatively, the nucleic acid sequences include sequences encoding both the heavy and light chains, or fragments thereof, of the antibody.

[0524] Delivery of the nucleic acids into a patient may be either direct, in which case the patient is directly exposed to the nucleic acid or nucleic acid-carrying vectors, or indirect, in which case, cells are first transformed with the nucleic acids in vitro, then transplanted into the patient. These two approaches are known, respectively, as in vivo or ex vivo gene therapy.

[0525] In a specific embodiment, the nucleic acid sequences are directly administered in vivo, where it is expressed to produce the encoded product. This can be accomplished by any of numerous methods known in the art, e.g., by constructing them as part of an appropriate nucleic acid expression vector and administering it so that they become intracellular, e.g., by infection using defective or attenuated retrovirals or other viral vectors (see U.S. Pat. No. 4,980,286), or by direct injection of naked DNA, or by use of microparticle bombardment (e.g., a gene gun; Biolistic, Dupont), or coating with lipids or cell-surface receptors or transfecting agents, encapsulation in liposomes, microparticles, or microcapsules, or by administering them in linkage to a peptide which is known to enter the nucleus, by administering it in linkage to a ligand subject to receptor-mediated endocytosis (see, e.g., Wu and Wu, J. Biol. Chem. 262:4429-4432 (1987)) (which can be used to target cell types specifically expressing the receptors), etc. In another embodiment, nucleic acid-ligand complexes can be formed in which the ligand comprises a fusogenic viral peptide to disrupt endosomes, allowing the nucleic acid to avoid lysosomal degradation. In yet another embodiment, the nucleic acid can be targeted in vivo for cell specific uptake and expression, by targeting a specific receptor (see, e.g., PCT Publications WO 92/06180; WO 92/22635; WO92/20316; WO93/14188, WO 93/20221). Alternatively, the nucleic acid can be introduced intracellularly and incorporated within host cell DNA for expression, by homologous recombination (Koller and Smithies, Proc. Natl. Acad. Sci. USA 86:8932-8935 (1989); Zijlstra et al., Nature 342:435-438 (1989)).

[0526] In a specific embodiment, viral vectors that contains nucleic acid sequences encoding an antibody of the invention are used. For example, a retroviral vector can be used (see Miller et al., Meth. Enzymol. 217:581-599 (1993)). These retroviral vectors contain the components necessary for the correct packaging of the viral genome and integration into the host cell DNA. The nucleic acid sequences encoding the antibody to be used in gene therapy are cloned into one or more vectors, which facilitates delivery of the gene into a patient. More detail about retroviral vectors can be found in Boesen et al., Biotherapy 6:291-302 (1994), which describes the use of a retroviral vector to deliver the mdr1 gene to hematopoietic stem cells in order to make the stem cells more resistant to chemotherapy. Other references illustrating the use of retroviral vectors in gene therapy are: Clowes et al., J. Clin. Invest. 93:644-651 (1994); Kiem et al., Blood 83:1467-1473 (1994); Salmons and Gunzberg, Human Gene Therapy 4:129-141 (1993); and Grossman and Wilson, Curr. Opin. in Genetics and Devel. 3:110-114 (1993).

[0527] Adenoviruses are other viral vectors that can be used in gene therapy. Adenoviruses are especially attractive vehicles for delivering genes to respiratory epithelia. Adenoviruses naturally infect respiratory epithelia where they cause a mild disease. Other targets for adenovirus-based delivery systems are liver, the central nervous system, endothelial cells, and muscle. Adenoviruses have the advantage of being capable of infecting non-dividing cells. Kozarsky and Wilson, Current Opinion in Genetics and Development 3:499-503 (1993) present a review of adenovirus-based gene therapy. Bout et al., Human Gene Therapy 5:3-10 (1994) demonstrated the use of adenovirus vectors to transfer genes to the respiratory epithelia of rhesus monkeys. Other instances of the use of adenoviruses in gene therapy can be found in Rosenfeld et al., Science 252:431-434 (1991); Rosenfeld et al., Cell 68:143-155 (1992); Mastrangeli et al., J. Clin. Invest. 91:225-234 (1993); PCT Publication WO94/12649; and Wang, et al., Gene Therapy 2:775-783 (1995). In a preferred embodiment, adenovirus vectors are used.

[0528] Adeno-associated virus (AAV) has also been proposed for use in gene therapy (Walsh et al., Proc. Soc. Exp. Biol. Med. 204:289-300 (1993); U.S. Pat. No. 5,436,146).

[0529] Another approach to gene therapy involves transferring a gene to cells in tissue culture by such methods as electroporation, lipofection, calcium phosphate mediated transfection, or viral infection. Usually, the method of transfer includes the transfer of a selectable marker to the cells. The cells are then placed under selection to isolate those cells that have taken up and are expressing the transferred gene. Those cells are then delivered to a patient.

[0530] In this embodiment, the nucleic acid is introduced into a cell prior to administration in vivo of the resulting recombinant cell. Such introduction can be carried out by any method known in the art, including but not limited to transfection, electroporation, microinjection, infection with a viral or bacteriophage vector containing the nucleic acid sequences, cell fusion, chromosome-mediated gene transfer, microcell-mediated gene transfer, spheroplast fusion, etc. Numerous techniques are known in the art for the introduction of foreign genes into cells (see, e.g., Loeffler and Behr, Meth. Enzymol. 217:599-618 (1993); Cohen et al., Meth. Enzymol. 217:618-644 (1993); Cline, Pharmac. Ther. 29:69-92m (1985) and may be used in accordance with the present invention, provided that the necessary developmental and physiological functions of the recipient cells are not disrupted. The technique should provide for the stable transfer of the nucleic acid to the cell, so that the nucleic acid is expressible by the cell and preferably heritable and expressible by its cell progeny.

[0531] The resulting recombinant cells can be delivered to a patient by various methods known in the art. Recombinant blood cells (e.g., hematopoietic stem or progenitor cells) are preferably administered intravenously. The amount of cells envisioned for use depends on the desired effect, patient state, etc., and can be determined by one skilled in the art.

[0532] Cells into which a nucleic acid can be introduced for purposes of gene therapy encompass any desired, available cell type, and include but are not limited to epithelial cells, endothelial cells, keratinocytes, fibroblasts, muscle cells, hepatocytes; blood cells such as T lymphocytes, B lymphocytes, monocytes, macrophages, neutrophils, eosinophils, megakaryocytes, granulocytes; various stem or progenitor cells, in particular hematopoietic stem or progenitor cells, e.g., as obtained from bone marrow, umbilical cord blood, peripheral blood, fetal liver, etc.

[0533] In a preferred embodiment, the cell used for gene therapy is autologous to the patient.

[0534] In an embodiment in which recombinant cells are used in gene therapy, nucleic acid sequences encoding an antibody are introduced into the cells such that they are expressible by the cells or their progeny, and the recombinant cells are then administered in vivo for therapeutic effect. In a specific embodiment, stem or progenitor cells are used. Any stem and/or progenitor cells which can be isolated and maintained in vitro can potentially be used in accordance with this embodiment of the present invention (see e.g. PCT Publication WO 94/08598; Stemple and Anderson, Cell 71:973-985 (1992); Rheinwald, Meth. Cell Bio. 21A:229 (1980); and Pittelkow and Scott, Mayo Clinic Proc. 61:771 (1986)).

[0535] In a specific embodiment, the nucleic acid to be introduced for purposes of gene therapy comprises an inducible promoter operably linked to the coding region, such that expression of the nucleic acid is controllable by the presence or absence of an appropriate inducer of transcription.

Demonstration of Therapeutic or Prophylactic Activity

[0536] The compounds or pharmaceutical compositions of the invention are preferably tested in vitro, and then in vivo for the desired therapeutic or prophylactic activity, prior to use in humans. For example, in vitro assays to demonstrate the therapeutic or prophylactic utility of a compound or pharmaceutical composition include, the effect of a compound on a cell line or a patient tissue sample. The effect of the compound or composition on the cell line and/or tissue sample can be determined utilizing techniques known to those of skill in the art including, but not limited to, rosette formation assays and cell lysis assays. In accordance with the invention, in vitro assays which can be used to determine whether administration of a specific compound is indicated, include in vitro cell culture assays in which a patient tissue sample is grown in culture, and exposed to or otherwise administered a compound, and the effect of such compound upon the tissue sample is observed.

Therapeutic/Prophylactic Administration and Composition

[0537] The invention provides methods of treatment, inhibition and prophylaxis by administration to a subject of an effective amount of a compound or pharmaceutical composition of the invention, preferably a polypeptide or antibody of the invention. In a preferred embodiment, the compound is substantially purified (e.g., substantially free from substances that limit its effect or produce undesired side-effects). The subject is preferably an animal, including but not limited to animals such as cows, pigs, horses, chickens, cats, dogs, etc., and is preferably a mammal, and most preferably human.

[0538] Formulations and methods of administration that can be employed when the compound comprises a nucleic acid or an immunoglobulin are described above; additional appropriate formulations and routes of administration can be selected from among those described herein below.

[0539] Various delivery systems are known and can be used to administer a compound of the invention, e.g., encapsulation in liposomes, microparticles, microcapsules, recombinant cells capable of expressing the compound, receptor-mediated endocytosis (see, e.g., Wu and Wu, J. Biol. Chem. 262:4429-4432 (1987)), construction of a nucleic acid as part of a retroviral or other vector, etc. Methods of introduction include but are not limited to intradermal, intramuscular, intraperitoneal, intravenous, subcutaneous, intranasal, epidural, and oral routes. The compounds or compositions may be administered by any convenient route, for example by infusion or bolus injection, by absorption through epithelial or mucocutaneous linings (e.g., oral mucosa, rectal and intestinal mucosa, etc.) and may be administered together with other biologically active agents. Administration can be systemic or local. In addition, it may be desirable to introduce the pharmaceutical compounds or compositions of the invention into the central nervous system by any suitable route, including intraventricular and intrathecal injection; intraventricular injection may be facilitated by an intraventricular catheter, for example, attached to a reservoir, such as an Ommaya reservoir. Pulmonary administration can also be employed, e.g., by use of an inhaler or nebulizer, and formulation with an aerosolizing agent.

[0540] In a specific embodiment, it may be desirable to administer the pharmaceutical compounds or compositions of the invention locally to the area in need of treatment; this may be achieved by, for example, and not by way of limitation, local infusion during surgery, topical application, e.g., in conjunction with a wound dressing after surgery, by injection, by means of a catheter, by means of a suppository, or by means of an implant, said implant being of a porous, non-porous, or gelatinous material, including membranes, such as sialastic membranes, or fibers. Preferably, when administering a protein, including an antibody, of the invention, care must be taken to use materials to which the protein does not absorb.

[0541] In another embodiment, the compound or composition can be delivered in a vesicle, in particular a liposome (see Langer, Science 249:1527-1533 (1990); Treat et al., in Liposomes in the Therapy of Infectious Disease and Cancer, Lopez-Berestein and Fidler (eds.), Liss, New York, pp. 353-365 (1989); Lopez-Berestein, ibid., pp. 317-327; see generally ibid.)

[0542] In yet another embodiment, the compound or composition can be delivered in a controlled release system. In one embodiment, a pump may be used (see Langer, supra; Sefton, CRC Crit. Ref. Biomed. Eng. 14:201 (1987); Buchwald et al., Surgery 88:507 (1980); Saudek et al., N. Engl. J. Med. 321:574 (1989)). In another embodiment, polymeric materials can be used (see Medical Applications of Controlled Release, Langer and Wise (eds.), CRC Pres., Boca Raton, Fla.(1974); Controlled Drug Bioavailability, Drug Product Design and Performance, Smolen and Ball (eds.), Wiley, New York (1984); Ranger and Peppas, J., Macromol. Sci. Rev. Macromol. Chem. 23:61 (1983); see also Levy et al., Science 228:190 (1985); During et al., Ann. Neurol. 25:351 (1989); Howard et al., J.Neurosurg. 71:105 (1989)). In yet another embodiment, a controlled release system can be placed in proximity of the therapeutic target, e.g., the brain, thus requiring only a fraction of the systemic dose (see, e.g., Qoodson, in Medical Applications of Controlled Release, supra, vol. 2, pp. 115-138 (1984)).

[0543] Other controlled release systems are discussed in the review by Langer (Science 249:1527-1533 (1990)).

[0544] In a specific embodiment where the compound of the invention is a nucleic acid encoding a protein, the nucleic acid can be administered in vivo to promote expression of its encoded protein, by constructing it as part of an appropriate nucleic acid expression vector and administering it so that it becomes intracellular, e.g., by use of a retroviral vector (see U.S. Pat. No. 4,980,286), or by direct injection, or by use of microparticle bombardment (e.g., a gene gun; Biolistic, Dupont), or coating with lipids or cell-surface receptors or transfecting agents, or by administering it in linkage to a homeobox-like peptide which is known to enter the nucleus (see e.g., Joliot et al., Proc. Natl. Acad. Sci. USA 88:1864-1868 (1991)), etc. Alternatively, a nucleic acid can be introduced intraceflularly and incorporated within host cell DNA for expression, by homologous recombination.

[0545] The present invention also provides pharmaceutical compositions. Such compositions comprise a therapeutically effective amount of a compound, and a pharmaceutically acceptable carrier. In a specific embodiment, the term “pharmaceutically acceptable” means approved by a regulatory agency of the Federal or a state government or listed in the U.S. Pharmacopeia or other generally recognized pharmacopeia for use in animals, and more particularly in humans. The term “carrier” refers to a diluent, adjuvant, excipient, or vehicle with which the therapeutic is administered. Such pharmaceutical carriers can be sterile liquids, such as water and oils, including those of petroleum, animal, vegetable or synthetic origin, such as peanut oil, soybean oil, mineral oil, sesame oil and the like. Water is a preferred carrier when the pharmaceutical composition is administered intravenously. Saline solutions and aqueous dextrose and glycerol solutions can also be employed as liquid carriers, particularly for injectable solutions. Suitable pharmaceutical excipients include starch, glucose, lactose, sucrose, gelatin, malt, rice, flour, chalk, silica gel, sodium stearate, glycerol monostearate, talc, sodium chloride, dried skim milk, glycerol, propylene, glycol, water, ethanol and the like. The composition, if desired, can also contain minor amounts of wetting or emulsifying agents, or pH buffering agents. These compositions can take the form of solutions, suspensions, emulsion, tablets, pills, capsules, powders, sustained-release formulations and the like. The composition can be formulated as a suppository, with traditional binders and carriers such as triglycerides. Oral formulation can include standard carriers such as pharmaceutical grades of mannitol, lactose, starch, magnesium stearate, sodium saccharine, cellulose, magnesium carbonate, etc. Examples of suitable pharmaceutical carriers are described in “Remington's Pharmaceutical Sciences” by E. W. Martin. Such compositions will contain a therapeutically effective amount of the compound, preferably in purified form, together with a suitable amount of carrier so as to provide the form for proper administration to the patient. The formulation should suit the mode of administration.

[0546] In a preferred embodiment, the composition is formulated in accordance with routine procedures as a pharmaceutical composition adapted for intravenous administration to human beings. Typically, compositions for intravenous administration are solutions in sterile isotonic aqueous buffer. Where necessary, the composition may also include a solubilizing agent and a local anesthetic such as lignocaine to ease pain at the site of the injection. Generally, the ingredients are supplied either separately or mixed together in unit dosage form, for example, as a dry lyophilized powder or water free concentrate in a hermetically sealed container such as an ampoule or sachette indicating the quantity of active agent. Where the composition is to be administered by infusion, it can be dispensed with an infusion bottle containing sterile pharmaceutical grade water or saline. Where the composition is administered by injection, an ampoule of sterile water for injection or saline can be provided so that the ingredients may be mixed prior to administration.

[0547] The compounds of the invention can be formulated as neutral or salt forms. Pharmaceutically acceptable salts include those formed with anions such as those derived from hydrochloric, phosphoric, acetic, oxalic, tartaric acids, etc., and those formed with cations such as those derived from sodium, potassium, ammonium, calcium, ferric hydroxides, isopropylamine, triethylamine, 2-ethylamino ethanol, histidine, procaine, etc.

[0548] The amount of the compound of the invention which will be effective in the treatment, inhibition and prevention of a disease or disorder associated with aberrant expression and/or activity of a polypeptide of the invention can be determined by standard clinical techniques. In addition, in vitro assays may optionally be employed to help identify optimal dosage ranges. The precise dose to be employed in the formulation will also depend on the route of administration, and the seriousness of the disease or disorder, and should be decided according to the judgment of the practitioner and each patient's circumstances. Effective doses may be extrapolated from dose-response curves derived from in vitro or animal model test systems.

[0549] For antibodies, the dosage administered to a patient is typically 0.1 mg/kg to 100 mg/kg of the patient's body weight. Preferably, the dosage administered to a patient is between 0.1 mg/kg and 20 mg/kg of the patient's body weight, more preferably 1 mg/kg to 10 mg/kg of the patient's body weight. Generally, human antibodies have a longer half-life within the human body than antibodies from other species due to the immune response to the foreign polypeptides. Thus, lower dosages of human antibodies and less frequent administration is often possible. Further, the dosage and frequency of administration of antibodies of the invention may be reduced by enhancing uptake and tissue penetration (e.g., into the brain) of the antibodies by modifications such as, for example, lipidation.

[0550] The invention also provides a pharmaceutical pack or kit comprising one or more containers filled with one or more of the ingredients of the pharmaceutical compositions of the invention. Optionally associated with such container(s) can be a notice in the form prescribed by a governmental agency regulating the manufacture, use or sale of pharmaceuticals or biological products, which notice reflects approval by the agency of manufacture, use or sale for human administration.

Diagnosis and Imaging

[0551] Labeled antibodies, and derivatives and analogs thereof, which specifically bind to a polypeptide of interest can be used for diagnostic purposes to detect, diagnose, or monitor diseases, disorders, and/or conditions associated with the aberrant expression and/or activity of a polypeptide of the invention. The invention provides for the detection of aberrant expression of a polypeptide of interest, comprising (a) assaying the expression of the polypeptide of interest in cells or body fluid of an individual using one or more antibodies specific to the polypeptide interest and (b) comparing the level of gene expression with a standard gene expression level, whereby an increase or decrease in the assayed polypeptide gene expression level compared to the standard expression level is indicative of aberrant expression.

[0552] The invention provides a diagnostic assay for diagnosing a disorder, comprising (a) assaying the expression of the polypeptide of interest in cells or body fluid of an individual using one or more antibodies specific to the polypeptide interest and (b) comparing the level of gene expression with a standard gene expression level, whereby an increase or decrease in the assayed polypeptide gene expression level compared to the standard expression level is indicative of a particular disorder. With respect to cancer, the presence of a relatively high amount of transcript in biopsied tissue from an individual may indicate a predisposition for the development of the disease, or may provide a means for detecting the disease prior to the appearance of actual clinical symptoms. A more definitive diagnosis of this type may allow health professionals to employ preventative measures or aggressive treatment earlier thereby preventing the development or further progression of the cancer.

[0553] Antibodies of the invention can be used to assay protein levels in a biological sample using classical immunohistological methods known to those of skill in the art (e.g., see Jalkanen et al., J. Cell. Biol. 101:976-985 (1985); Jalkanen et al., J. Cell. Biol. 105:3087-3096 (1987)). Other antibody-based methods useful for detecting protein gene expression include immunoassays, such as the enzyme linked immunosorbent assay (ELISA) and the radioimmunoassay (RIA). Suitable antibody assay labels are known in the art and include enzyme labels, such as, glucose oxidase; radioisotopes, such as iodine (125I, 121I), carbon (14C), sulfur (35S), tritium (3H), indium (112In), and technetium (99Tc); luminescent labels, such as luminol; and fluorescent labels, such as fluorescein and rhodamine, and biotin.

[0554] One facet of the invention is the detection and diagnosis of a disease or disorder associated with aberrant expression of a polypeptide of interest in an animal, preferably a mammal and most preferably a human. In one embodiment, diagnosis comprises: a) administering (for example, parenterally, subcutaneously, or intraperitoneally) to a subject an effective amount of a labeled molecule which specifically binds to the polypeptide of interest; b) waiting for a time interval following the administering for permitting the labeled molecule to preferentially concentrate at sites in the subject where the polypeptide is expressed (and for unbound labeled molecule to be cleared to background level); c) determining background level; and d) detecting the labeled molecule in the subject, such that detection of labeled molecule above the background level indicates that the subject has a particular disease or disorder associated with aberrant expression of the polypeptide of interest. Background level can be determined by various methods including, comparing the amount of labeled molecule detected to a standard value previously determined for a particular system.

[0555] It will be understood in the art that the size of the subject and the imaging system used will determine the quantity of imaging moiety needed to produce diagnostic images. In the case of a radioisotope moiety, for a human subject, the quantity of radioactivity injected will normally range from about 5 to 20 millicuries of 99 mTc. The labeled antibody or antibody fragment will then preferentially accumulate at the location of cells which contain the specific protein. In vivo tumor imaging is described in S. W. Burchiel et al., “hnmunopharmacokinetics of Radiolabeled Antibodies and Their Fragments.” (Chapter 13 in Tumor Imaging: The Radiochemical Detection of Cancer, S. W. Burchiel and B. A. Rhodes, eds., Masson Publishing Inc. (1982)).

[0556] Depending on several variables, including the type of label used and the mode of administration, the time interval following the administration for permitting the labeled molecule to preferentially concentrate at sites in the subject and for unbound labeled molecule to be cleared to background level is 6 to 48 hours or 6 to 24 hours or 6 to 12 hours. In another embodiment the time interval following administration is 5 to 20 days or 5 to 10 days.

[0557] In an embodiment, monitoring of the disease or disorder is carried out by repeating the method for diagnosing the disease or disease, for example, one month after initial diagnosis, six months after initial diagnosis, one year after initial diagnosis, etc.

[0558] Presence of the labeled molecule can be detected in the patient using methods known in the art for in vivo scanning. These methods depend upon the type of label used. Skilled artisans will be able to determine the appropriate method for detecting a particular label. Methods and devices that may be used in the diagnostic methods of the invention include, but are not limited to, computed tomography (CT), whole body scan such as position emission tomography (PET), magnetic resonance imaging (MRI), and sonography.

[0559] In a specific embodiment, the molecule is labeled with a radioisotope and is detected in the patient using a radiation responsive surgical instrument (Thurston et al., U.S. Pat. No. 5,441,050). In another embodiment, the molecule is labeled with a fluorescent compound and is detected in the patient using a fluorescence responsive scanning instrument. In another embodiment, the molecule is labeled with a positron emitting metal and is detected in the patent using positron emission-tomography. In yet another embodiment, the molecule is labeled with a paramagnetic label and is detected in a patient using magnetic resonance imaging (MRI).

Kits

[0560] The present invention provides kits that can be used in the above methods. In one embodiment, a kit comprises an antibody of the invention, preferably a purified antibody, in one or more containers. In a specific embodiment, the kits of the present invention contain a substantially isolated polypeptide comprising an epitope which is specifically immunoreactive with an antibody included in the kit. Preferably, the kits of the present invention further comprise a control antibody which does not react with the polypeptide of interest. In another specific embodiment, the kits of the present invention contain a means for detecting the binding of an antibody to a polypeptide of interest (e.g., the antibody may be conjugated to a detectable substrate such as a fluorescent compound, an enzymatic substrate, a radioactive compound or a luminescent compound, or a second antibody which recognizes the first antibody may be conjugated to a detectable substrate).

[0561] In another specific embodiment of the present invention, the kit is a diagnostic kit for use in screening serum containing antibodies specific against proliferative and/or cancerous polynucleotides and polypeptides. Such a kit may include a control antibody that does not react with the polypeptide of interest. Such a kit may include a substantially isolated polypeptide antigen comprising an epitope which is specifically immunoreactive with at least one anti-polypeptide antigen antibody. Further, such a kit includes means for detecting the binding of said antibody to the antigen (e.g., the antibody may be conjugated to a fluorescent compound such as fluorescein or rhodamine which can be detected by flow cytometry). In specific embodiments, the kit may include a recombinantly produced or chemically synthesized polypeptide antigen. The polypeptide antigen of the kit may also be attached to a solid support.

[0562] In a more specific embodiment the detecting means of the above-described kit includes a solid support to which said polypeptide antigen is attached. Such a kit may also include a non-attached reporter-labeled anti-human antibody. In this embodiment, binding of the antibody to the polypeptide antigen can be detected by binding of the said reporter-labeled antibody.

[0563] In an additional embodiment, the invention includes a diagnostic kit for use in screening serum containing antigens of the polypeptide of the invention. The diagnostic kit includes a substantially isolated antibody specifically immunoreactive with polypeptide or polynucleotide antigens, and means for detecting the binding of the polynucleotide or polypeptide antigen to the antibody. In one embodiment, the antibody is attached to a solid support. In a specific embodiment, the antibody may be a monoclonal antibody. The detecting means of the kit may include a second, labeled monoclonal antibody. Alternatively, or in addition, the detecting means may include a labeled, competing antigen.

[0564] In one diagnostic configuration, test serum is reacted with a solid phase reagent having a surface-bound antigen obtained by the methods of the present invention. After binding with specific antigen antibody to the reagent and removing unbound serum components by washing, the reagent is reacted with reporter-labeled anti-human antibody to bind reporter to the reagent in proportion to the amount of bound anti-antigen antibody on the solid support. The reagent is again washed to remove unbound labeled antibody, and the amount of reporter associated with the reagent is determined. Typically, the reporter is an enzyme which is detected by incubating the solid phase in the presence of a suitable fluorometric, luminescent or colorimetric substrate (Sigma, St. Louis, Mo.).

[0565] The solid surface reagent in the above assay is prepared by known techniques for attaching protein material to solid support material, such as polymeric beads, dip sticks, 96-well plate or filter material. These attachment methods generally include non-specific adsorption of the protein to the support or covalent attachment of the protein, typically through a free amine group, to a chemically reactive group on the solid support, such as an activated carboxyl, hydroxyl, or aldehyde group. Alternatively, streptavidin coated plates can be used in conjunction with biotinylated antigen(s).

[0566] Thus, the invention provides an assay system or kit for carrying out this diagnostic method. The kit generally includes a support with surface-bound recombinant antigens, and a reporter-labeled anti-human antibody for detecting surface-bound anti-antigen antibody.

Uses of the Polynucleotides

[0567] Each of the polynucleotides identified herein can be used in numerous ways as reagents. The following description should be considered exemplary and utilizes known techniques.

[0568] The polynucleotides of the present invention are useful for chromosome identification. There exists an ongoing need to identify new chromosome markers, since few chromosome marking reagents, based on actual sequence data (repeat polymorphisms), are presently available. Each sequence is specifically targeted to and can hybridize with a particular location on an individual human chromosome, thus each polynucleotide of the present invention can routinely be used as a chromosome marker using techniques known in the art. Table 1B, column 9 provides the chromosome location of some of the polynucleotides of the invention.

[0569] Briefly, sequences can be mapped to chromosomes by preparing PCR primers (preferably at least 15 bp (e.g., 15-25 bp) from the sequences shown in SEQ ID NO:X. Primers can optionally be selected using computer analysis so that primers do not span more than one predicted exon in the genomic DNA. These primers are then used for PCR screening of somatic cell hybrids containing individual human chromosomes. Only those hybrids containing the human gene corresponding to SEQ ID NO:X will yield an amplified fragment.

[0570] Similarly, somatic hybrids provide a rapid method of PCR mapping the polynucleotides to particular chromosomes. Three or more clones can be assigned per day using a single thermal cycler. Moreover, sublocalization of the polynucleotides can be achieved with panels of specific chromosome fragments. Other gene mapping strategies that can be used include in situ hybridization, prescreening with labeled flow-sorted chromosomes, preselection by hybridization to construct chromosome specific-cDNA libraries, and computer mapping techniques (See, e.g., Shuler, Trends Biotechnol 16:456-459 (1998) which is hereby incorporated by reference in its entirety).

[0571] Precise chromosomal location of the polynucleotides can also be achieved using fluorescence in situ hybridization (FISH) of a metaphase chromosomal spread. This technique uses polynucleotides as short as 500 or 600 bases; however, polynucleotides 2,000-4,000 bp are preferred. For a review of this technique, see Verma et al., “Human Chromosomes: a Manual of Basic Techniques,” Pergamon Press, New York (1988).

[0572] For chromosome mapping, the polynucleotides can be used individually (to mark a single chromosome or a single site on that chromosome) or in panels (for marking multiple sites and/or multiple chromosomes).

[0573] Thus, the present invention also provides a method for chromosomal localization which involves (a) preparing PCR primers from the polynucleotide sequences in Table 1B and/or Table 2 and SEQ ID NO:X and (b) screening somatic cell hybrids containing individual chromosomes.

[0574] The polynucleotides of the present invention would likewise be useful for radiation hybrid mapping, HAPPY mapping, and long range restriction mapping. For a review of these techniques and others known in the art, see, e.g. Dear, “Genome Mapping: A Practical Approach,” IRL Press at Oxford University Press, London (1997); Aydin, J. Mol. Med. 77:691-694 (1999); Hacia et al., Mol. Psychiatry 3:483-492 (1998); Herrick et al., Chromosome Res. 7:409-423 (1999); Hamilton et al., Methods Cell Biol. 62:265-280 (2000); and/or Ott, J. Hered. 90:68-70 (1999) each of which is hereby incorporated by reference in its entirety.

[0575] Once a polynucleotide has been mapped to a precise chromosomal location, the physical position of the polynucleotide can be used in linkage analysis. Linkage analysis establishes coinheritance between a chromosomal location and presentation of a particular disease. (Disease mapping data are found, for example, in V. McKusick, Mendelian Inheritance in Man (available on line through Johns Hopkins University Welch Medical Library)). Column 10 of Table 1B provides an OMIM reference identification number of diseases associated with the cytologic band disclosed in column 9 of Table 1B, as determined using techniques described herein and by reference to Table 5. Assuming 1 megabase mapping resolution and one gene per 20 kb, a cDNA precisely localized to a chromosomal region associated with the disease could be one of 50-500 potential causative genes.

[0576] Thus, once coinheritance is established, differences in a polynucleotide of the invention and the corresponding gene between affected and unaffected individuals can be examined. First, visible structural alterations in the chromosomes, such as deletions or translocations, are examined in chromosome spreads or by PCR. If no structural alterations exist, the presence of point mutations are ascertained. Mutations observed in some or all affected individuals, but not in normal individuals, indicates that the mutation may cause the disease. However, complete sequencing of the polypeptide and the corresponding gene from several normal individuals is required to distinguish the mutation from a polymorphism. If a new polymorphism is identified, this polymorphic polypeptide can be used for further linkage analysis.

[0577] Furthermore, increased or decreased expression of the gene in affected individuals as compared to unaffected individuals can be assessed using the polynucleotides of the invention. Any of these alterations (altered expression, chromosomal rearrangement, or mutation) can be used as a diagnostic or prognostic marker. Diagnostic and prognostic methods, kits and reagents encompassed by the present invention are briefly described below and more thoroughly elsewhere herein (see e.g., the sections labeled “Antibodies”, “Diagnostic Assays”, and “Methods for Detecting Diseases”).

[0578] Thus, the invention also provides a diagnostic method useful during diagnosis of a disorder, involving measuring the expression level of polynucleotides of the present invention in cells or body fluid from an individual and comparing the measured gene expression level with a standard level of polynucleotide expression level, whereby an increase or decrease in the gene expression level compared to the standard is indicative of a disorder. Additional non-limiting examples of diagnostic methods encompassed by the present invention are more thoroughly described elsewhere herein (see, e.g., Example 11).

[0579] In still another embodiment, the invention includes a kit for analyzing samples for the presence of proliferative and/or cancerous polynucleotides derived from a test subject. In a general embodiment, the kit includes at least one polynucleotide probe containing a nucleotide sequence that will specifically hybridize with a polynucleotide of the invention and a suitable container. In a specific embodiment, the kit includes two polynucleotide probes defining an internal region of the polynucleotide of the invention, where each probe has one strand containing a 31′mer-end internal to the region. In a further embodiment, the probes may be useful as primers for polymerase chain reaction amplification.

[0580] Where a diagnosis of a related disorder, including, for example, diagnosis of a tumor, has already been made according to conventional methods, the present invention is useful as a prognostic indicator, whereby patients exhibiting enhanced or depressed polynucleotide of the invention expression will experience a worse clinical outcome relative to patients expressing the gene at a level nearer the standard level.

[0581] By “measuring the expression level of polynucleotides of the invention” is intended qualitatively or quantitatively measuring or estimating the level of the polypeptide of the invention or the level of the mRNA encoding the polypeptide of the invention in a first biological sample either directly (e.g., by determining or estimating absolute protein level or mRNA level) or relatively (e.g., by comparing to the polypeptide level or mRNA level in a second biological sample). Preferably, the polypeptide level or mRNA level in the first biological sample is measured or estimated and compared to a standard polypeptide level or mRNA level, the standard being taken from a second biological sample obtained from an individual not having the related disorder or being determined by averaging levels from a population of individuals not having a related disorder. As will be appreciated in the art, once a standard polypeptide level or mRNA level is known, it can be used repeatedly as a standard for comparison.

[0582] By “biological sample” is intended any biological sample obtained from an individual, body fluid, cell line, tissue culture, or other source which contains polypeptide of the present invention or the corresponding mRNA. As indicated, biological samples include body fluids (such as semen, lymph, vaginal pool, sera, plasma, urine, synovial fluid and spinal fluid) which contain the polypeptide of the present invention, and tissue sources found to express the polypeptide of the present invention. Methods for obtaining tissue biopsies and body fluids from mammals are well known in the art. Where the biological sample is to include mRNA, a tissue biopsy is the preferred source.

[0583] The method(s) provided above may preferably be applied in a diagnostic method and/or kits in which polynucleotides and/or polypeptides of the invention are attached to a solid support. In one exemplary method, the support may be a “gene chip” or a “biological chip” as described in U.S. Pat. Nos. 5,837,832, 5,874,219, and 5,856,174. Further, such a gene chip with polynucleotides of the invention attached may be used to identify polymorphisms between the isolated polynucleotide sequences of the invention, with polynucleotides isolated from a test subject. The knowledge of such polymorphisms (i.e. their location, as well as, their existence) would be beneficial in identifying disease loci for many disorders, such as for example, in neural disorders, immune system disorders, muscular disorders, reproductive disorders, gastrointestinal disorders, pulmonary disorders, digestive disorders, metabolic disorders, cardiovascular disorders, renal disorders, proliferative disorders, and/or cancerous diseases and conditions. Such a method is described in U.S. Pat. Nos. 5,858,659 and 5,856,104. The US Patents referenced supra are hereby incorporated by reference in their entirety herein.

[0584] The present invention encompasses polynucleotides of the present invention that are chemically synthesized, or reproduced as peptide nucleic acids (PNA), or according to other methods known in the art. The use of PNAs would serve as the preferred form if the polynucleotides of the invention are incorporated onto a solid support, or gene chip. For the purposes of the present invention, a peptide nucleic acid (PNA) is a polyamide type of DNA analog and the monomeric units for adenine, guanine, thymine and cytosine are available commercially (Perceptive Biosystems). Certain components of DNA, such as phosphorus, phosphorus oxides, or deoxyribose derivatives, are not present in PNAs. As disclosed by Nielsen et al., Science 254, 1497 (1991); and Egholm et al., Nature 365, 666 (1993), PNAs bind specifically and tightly to complementary DNA strands and are not degraded by nucleases. In fact, PNA binds more strongly to DNA than DNA itself does. This is probably because there is no electrostatic repulsion between the two strands, and also the polyamide backbone is more flexible. Because of this, PNA/DNA duplexes bind under a wider range of stringency conditions than DNA/DNA duplexes, making it easier to perform multiplex hybridization. Smaller probes can be used than with DNA due to the strong binding. In addition, it is more likely that single base mismatches can be determined with PNA/DNA hybridization because a single mismatch in a PNA/DNA 15-mer lowers the melting point (T.sub.m) by 8°-20° C., vs. 4°-16° C. for the DNA/DNA 15-mer duplex. Also, the absence of charge groups in PNA means that hybridization can be done at low ionic strengths and reduce possible interference by salt during the analysis.

[0585] The compounds of the present invention have uses which include, but are not limited to, detecting cancer in mammals. In particular the invention is useful during diagnosis of pathological cell proliferative neoplasias which include, but are not limited to: acute myelogenous leukemias including acute monocytic leukemia, acute myeloblastic leukemia, acute promyelocytic leukemia, acute myelomonocytic leukemia, acute erythroleukemia, acute megakaryocytic leukemia, and acute undifferentiated leukemia, etc.; and chronic myelogenous leukemias including chronic myelomonocytic leukemia, chronic granulocytic leukemia, etc. Preferred mammals include monkeys, apes, cats, dogs, cows, pigs, horses, rabbits and humans. Particularly preferred are humans.

[0586] Pathological cell proliferative disorders are often associated with inappropriate activation of proto-oncogenes. (Gelmann, E. P. et al., “The Etiology of Acute Leukemia: Molecular Genetics and Viral Oncology,” in Neoplastic Diseases of the Blood, Vol 1., Wiernik, P. H. et al. eds., 161-182 (1985)). Neoplasias are now believed to result from the qualitative alteration of a normal cellular gene product, or from the quantitative modification of gene expression by insertion into the chromosome of a viral sequence, by chromosomal translocation of a gene to a more actively transcribed region, or by some other mechanism. (Gelmann et al., supra) It is likely that mutated or altered expression of specific genes is involved in the pathogenesis of some leukemias, among other tissues and cell types. (Gelmann et al., supra) Indeed, the human counterparts of the oncogenes involved in some animal neoplasias have been amplified or translocated in some cases of human leukemia and carcinoma. (Gelmann et al., supra)

[0587] For example, c-myc expression is highly amplified in the non-lymphocytic leukemia cell line HL-60. When HL-60 cells are chemically induced to stop proliferation, the level of c-myc is found to be downregulated. (International Publication Number WO 91/15580). However, it has been shown that exposure of HL-60 cells to a DNA construct that is complementary to the 5′ end of c-myc or c-myb blocks translation of the corresponding mRNAs which downregulates expression of the c-myc or c-myb proteins and causes arrest of cell proliferation and differentiation of the treated cells. (International Publication Number WO 91/15580; Wickstrom et al., Proc. Natl. Acad. Sci. 85:1028 (1988); Anfossi et al., Proc. Natl. Acad. Sci. 86:3379 (1989)). However, the skilled artisan would appreciate the present invention's usefulness is not be limited to treatment, prevention, and/or prognosis of proliferative disorders of cells and tissues of hematopoietic origin, in light of the numerous cells and cell types of varying origins which are known to exhibit proliferative phenotypes.

[0588] In addition to the foregoing, a polynucleotide of the present invention can be used to control gene expression through triple helix formation or through antisense DNA or RNA. Antisense techniques are discussed, for example, in Okano, J. Neurochem. 56: 560 (1991); “Oligodeoxynucleotides as Antisense Inhibitors of Gene Expression, CRC Press, Boca Raton, Fla. (1988). Triple helix formation is discussed in, for instance Lee et al., Nucleic Acids Research 6: 3073 (1979); Cooney et al., Science 241: 456 (1988); and Dervan et al., Science 251: 1360 (1991). Both methods rely on binding of the polynucleotide to a complementary DNA or RNA. For these techniques, preferred polynucleotides are usually oligonucleotides 20 to 40 bases in length and complementary to either the region of the gene involved in transcription (triple helix—see Lee et al., Nucl. Acids Res. 6:3073 (1979); Cooney et al., Science 241:456 (1988); and Dervan et al., Science 251:1360 (1991)) or to the mRNA itself (antisense—Okano, J. Neurochem. 56:560 (1991); Oligodeoxy-nucleotides as Antisense Inhibitors of Gene Expression, CRC Press, Boca Raton, Fla. (1988)). Triple helix formation optimally results in a shut-off of RNA transcription from DNA, while antisense RNA hybridization blocks translation of an mRNA molecule into polypeptide. The oligonucleotide described above can also be delivered to cells such that the antisense RNA or DNA may be expressed in vivo to inhibit production of polypeptide of the present invention antigens. Both techniques are effective in model systems, and the information disclosed herein can be used to design antisense or triple helix polynucleotides in an effort to treat disease, and in particular, for the treatment of proliferative diseases and/or conditions. Non-limiting antisense and triple helix methods encompassed by the present invention are more thoroughly described elsewhere herein (see, e.g., the section labeled “Antisense and Ribozyme (Antagonists)”).

[0589] Polynucleotides of the present invention are also useful in gene therapy. One goal of gene therapy is to insert a normal gene into an organism having a defective gene, in an effort to correct the genetic defect. The polynucleotides disclosed in the present invention offer a means of targeting such genetic defects in a highly accurate manner. Another goal is to insert a new gene that was not present in the host genome, thereby producing a new trait in the host cell. Additional non-limiting examples of gene therapy methods encompassed by the present invention are more thoroughly described elsewhere herein (see, e.g., the sections labeled “Gene Therapy Methods”, and Examples 16, 17 and 18).

[0590] The polynucleotides are also useful for identifying individuals from minute biological samples. The United States military, for example, is considering the use of restriction fragment length polymorphism (RFLP) for identification of its personnel. In this technique, an individual's genomic DNA is digested with one or more restriction enzymes, and probed on a Southern blot to yield unique bands for identifying personnel. This method does not suffer from the current limitations of “Dog Tags” which can be lost, switched, or stolen, making positive identification difficult. The polynucleotides of the present invention can be used as additional DNA markers for RFLP.

[0591] The polynucleotides of the present invention can also be used as an alternative to RFLP, by determining the actual base-by-base DNA sequence of selected portions of an individual's genome. These sequences can be used to prepare PCR primers for amplifying and isolating such selected DNA, which can then be sequenced. Using this technique, individuals can be identified because each individual will have a unique set of DNA sequences. Once an unique ID database is established for an individual, positive identification of that individual, living or dead, can be made from extremely small tissue samples.

[0592] Forensic biology also benefits from using DNA-based identification techniques as disclosed herein. DNA sequences taken from very small biological samples such as tissues, e.g., hair or skin, or body fluids, e.g., blood, saliva, semen, synovial fluid, amniotic fluid, breast milk, lymph, pulmonary sputum or surfactant, urine, fecal matter, etc., can be amplified using PCR. In one prior art technique, gene sequences amplified from polymorphic loci, such as DQa class II HLA gene, are used in forensic biology to identify individuals. (Erlich, H., PCR Technology, Freeman and Co. (1992)). Once these specific polymorphic loci are amplified, they are digested with one or more restriction enzymes, yielding an identifying set of bands on a Southern blot probed with DNA corresponding to the DQa class II HLA gene. Similarly, polynucleotides of the present invention can be used as polymorphic markers for forensic purposes.

[0593] There is also a need for reagents capable of identifying the source of a particular tissue. Such need arises, for example, in forensics when presented with tissue of unknown origin. Appropriate reagents can comprise, for example, DNA probes or primers prepared from the sequences of the present invention, specific to tissues, including but not limited to those shown in Table 1B. Panels of such reagents can identify tissue by species and/or by organ type. In a similar fashion, these reagents can be used to screen tissue cultures for contamination. Additional non-limiting examples of such uses are further described herein.

[0594] The polynucleotides of the present invention are also useful as hybridization probes for differential identification of the tissue(s) or cell type(s) present in a biological sample. Similarly, polypeptides and antibodies directed to polypeptides of the present invention are useful to provide immunological probes for differential identification of the tissue(s) (e.g., immunohistochemistry assays) or cell type(s) (e.g., immunocytochemistry assays). In addition, for a number of disorders of the above tissues or cells, significantly higher or lower levels of gene expression of the polynucleotides/polypeptides of the present invention may be detected in certain tissues (e.g., tissues expressing polypeptides and/or polynucleotides of the present invention, for example, those disclosed in column 4 of Table 1B, and/or cancerous and/or wounded tissues) or bodily fluids (e.g., semen, lymph, vaginal pool, serum, plasma, urine, synovial fluid or spinal fluid) taken from an individual having such a disorder, relative to a “standard” gene expression level, i.e., the expression level in healthy tissue from an individual not having the disorder.

[0595] Thus, the invention provides a diagnostic method of a disorder, which involves: (a) assaying gene expression level in cells or body fluid of an individual; (b) comparing the gene expression level with a standard gene expression level, whereby an increase or decrease in the assayed gene expression level compared to the standard expression level is indicative of a disorder.

[0596] In the very least, the polynucleotides of the present invention can be used as molecular weight markers on Southern gels, as diagnostic probes for the presence of a specific mRNA in a particular cell type, as a probe to “subtract-out” known sequences in the process of discovering novel polynucleotides, for selecting and making oligomers for attachment to a “gene chip” or other support, to raise anti-DNA antibodies using DNA immunization techniques, and as an antigen to elicit an immune response.

Uses of the Polypeptides

[0597] Each of the polypeptides identified herein can be used in numerous ways. The following description should be considered exemplary and utilizes known techniques.

[0598] Polypeptides and antibodies directed to polypeptides of the present invention are useful to provide immunological probes for differential identification of the tissue(s) (e.g., immunohistochemistry assays such as, for example, ABC immunoperoxidase (Hsu et al., J. Histochem. Cytochem. 29:577-580 (1981)) or cell type(s) (e.g., immunocytochemistry assays).

[0599] Antibodies can be used to assay levels of polypeptides encoded by polynucleotides of the invention in a biological sample using classical immunohistological methods known to those of skill in the art (e.g., see Jalkanen, et al., J. Cell. Biol. 101:976-985 (1985); Jalkanen, et al., J. Cell. Biol. 105:3087-3096 (1987)). Other antibody-based methods useful for detecting protein gene expression include immunoassays, such as the enzyme linked immunosorbent assay (ELISA) and the radioimmunoassay (RIA). Suitable antibody assay labels are known in the art and include enzyme labels, such as, glucose oxidase; radioisotopes, such as iodine (¹³¹I, ¹²⁵I, ¹²³I, ¹²¹I), carbon (¹⁴C), sulfur (³⁵S), tritium (³H), indium (^{115m}In, ^{113m}In, ¹¹²In, ¹¹¹In), and technetium (⁹⁹Tc, ^{99m}Tc), thallium (²⁰¹Ti), gallium (⁶⁸Ga, ⁶⁷Ga), palladium (¹⁰³Pd), molybdenum (⁹⁹Mo), xenon (¹³³Xe), fluorine (¹⁸F), ¹⁵³Sm, ¹⁷⁷Lu, ¹⁵⁹Gd, ¹⁴⁹Pm, ¹⁴⁰La, ¹⁷⁵Yb, ¹⁶⁶Ho, ⁹⁰Y, ⁴⁷Sc, ¹⁸⁶Re, ¹⁸⁸Re, ¹⁴²Pr, ¹⁰⁵Rh, ⁹⁷Ru; luminescent labels, such as luminol; and fluorescent labels, such as fluorescein and rhodamine, and biotin.

[0600] In addition to assaying levels of polypeptide of the present invention in a biological sample, proteins can also be detected in vivo by imaging. Antibody labels or markers for in vivo imaging of protein include those detectable by X-radiography, NMR or ESR. For X-radiography, suitable labels include radioisotopes such as barium or cesium, which emit detectable radiation but are not overtly harmful to the subject. Suitable markers for NMR and ESR include those with a detectable characteristic spin, such as deuterium, which may be incorporated into the antibody by labeling of nutrients for the relevant hybridoma.

[0601] A protein-specific antibody or antibody fragment which has been labeled with an appropriate detectable imaging moiety, such as a radioisotope (for example, ¹³¹I, ¹¹²In, ^{99m}Tc, (¹³¹I, ¹²⁵I, ¹²³I, ¹²¹I), carbon (¹⁴C), sulfur (³⁵S), tritium (³H), indium (^{115m}In, ^{113m}In, ¹¹²In, ¹¹¹In), and technetium (⁹⁹Tc, ^{99m}Tc), thallium (²⁰¹Ti), gallium (⁶⁸Ga, ⁶⁷Ga), palladium (¹⁰³Pd), molybdenum (⁹⁹Mo), xenon (¹³³Xe), fluorine (¹⁸F, ¹⁵³Sm, ¹⁷⁷Lu, ¹⁵⁹Gd, ¹⁴⁹Pm, ¹⁴⁰La, ¹⁷⁵Yb, ¹⁶⁶Ho, ⁹⁰Y, ⁴⁷Sc, ¹⁸⁶Re, ¹⁸⁸Re, ¹⁴²Pr, ¹⁰⁵Rh, ⁹⁷Ru), a radio-opaque substance, or a material detectable by nuclear magnetic resonance, is introduced (for example, parenterally, subcutaneously or intraperitoneally) into the mammal to be examined for immune system disorder. It will be understood in the art that the size of the subject and the imaging system used will determine the quantity of imaging moiety needed to produce diagnostic images. In the case of a radioisotope moiety, for a human subject, the quantity of radioactivity injected will normally range from about 5 to 20 millicuries of ^{99m}Tc. The labeled antibody or antibody fragment will then preferentially accumulate at the location of cells which express the polypeptide encoded by a polynucleotide of the invention. In vivo tumor imaging is described in S. W. Burchiel et al., “Immunopharmacokinetics of Radiolabeled Antibodies and Their Fragments” (Chapter 13 in Tumor Imaging: The Radiochemical Detection of Cancer, S. W. Burchiel and B. A. Rhodes, eds., Masson Publishing Inc. (1982)).

[0602] In one embodiment, the invention provides a method for the specific delivery of compositions of the invention to cells by administering polypeptides of the invention (e.g., polypeptides encoded by polynucleotides of the invention and/or antibodies) that are associated with heterologous polypeptides or nucleic acids. In one example, the invention provides a method for delivering a therapeutic protein into the targeted cell. In another example, the invention provides a method for delivering a single stranded nucleic acid (e.g., antisense or ribozymes) or double stranded nucleic acid (e.g., DNA that can integrate into the cell's genome or replicate episomally and that can be transcribed) into the targeted cell.

[0603] In another embodiment, the invention provides a method for the specific destruction of cells (e.g., the destruction of tumor cells) by administering polypeptides of the invention in association with toxins or cytotoxic prodrugs.

[0604] By “toxin” is meant one or more compounds that bind and activate endogenous cytotoxic effector systems, radioisotopes, holotoxins, modified toxins, catalytic subunits of toxins, or any molecules or enzymes not normally present in or on the surface of a cell that under defined conditions cause the cell's death. Toxins that may be used according to the methods of the invention include, but are not limited to, radioisotopes known in the art, compounds such as, for example, antibodies (or complement fixing containing portions thereof) that bind an inherent or induced endogenous cytotoxic effector system, thymidine kinase, endonuclease, RNAse, alpha toxin, ricin, abrin, Pseudomonas exotoxin A, diphtheria toxin, saporin, momordin, gelonin, pokeweed antiviral protein, alpha-sarcin and cholera toxin. “Toxin” also includes a cytostatic or cytocidal agent, a therapeutic agent or a radioactive metal ion, e.g., alpha-emitters such as, for example, ²¹³Bi, or other radioisotopes such as, for example, ¹⁰³Pd, ¹³³Xe, ¹³¹I, ⁶⁸Ge, ⁵⁷Co, ⁶⁵Zn, ⁸⁵Sr, ³²P, ³⁵S, ⁹⁰Y, ¹⁵³Sm, ¹⁵³Gd, ¹⁶⁹Yb, ⁵¹Cr, ⁵⁴Mn, ⁷⁵Se, ¹¹³Sn, ⁹⁰Yttrium, ¹¹⁷Tin, ¹⁸⁶Rhenium, ¹⁶⁶Holmium, and ¹⁸⁸Rhenium; luminescent labels, such as luminol; and fluorescent labels, such as fluorescein and rhodamine, and biotin. In a specific embodiment, the invention provides a method for the specific destruction of cells (e.g., the destruction of tumor cells) by administering polypeptides of the invention or antibodies of the invention in association with the radioisotope ⁹⁰Y. In another specific embodiment, the invention provides a method for the specific destruction of cells (e.g., the destruction of tumor cells) by administering polypeptides of the invention or antibodies of the invention in association with the radioisotope ¹¹¹In. In a further specific embodiment, the invention provides a method for the specific destruction of cells (e.g., the destruction of tumor cells) by administering polypeptides of the invention or antibodies of the invention in association with the radioisotope ¹³¹I.

[0605] Techniques known in the art may be applied to label polypeptides of the invention (including antibodies). Such techniques include, but are not limited to, the use of bifunctional conjugating agents (see e.g., U.S. Pat. Nos. 5,756,065; 5,714,631; 5,696,239; 5,652,361; 5,505,931; 5,489,425; 5,435,990; 5,428,139; 5,342,604; 5,274,119; 4,994,560; and 5,808,003; the contents of each of which are hereby incorporated by reference in its entirety).

[0606] Thus, the invention provides a diagnostic method of a disorder, which involves (a) assaying the expression level of a polypeptide of the present invention in cells or body fluid of an individual; and (b) comparing the assayed polypeptide expression level with a standard polypeptide expression level, whereby an increase or decrease in the assayed polypeptide expression level compared to the standard expression level is indicative of a disorder. With respect to cancer, the presence of a relatively high amount of transcript in biopsied tissue from an individual may indicate a predisposition for the development of the disease, or may provide a means for detecting the disease prior to the appearance of actual clinical symptoms. A more definitive diagnosis of this type may allow health professionals to employ preventative measures or aggressive treatment earlier thereby preventing the development or further progression of the cancer.

[0607] Moreover, polypeptides of the present invention can be used to treat or prevent diseases or conditions such as, for example, neural disorders, immune system disorders, muscular disorders, reproductive disorders, gastrointestinal disorders, pulmonary disorders, cardiovascular disorders, renal disorders, proliferative disorders, and/or cancerous diseases and conditions. For example, patients can be administered a polypeptide of the present invention in an effort to replace absent or decreased levels of the polypeptide (e.g., insulin), to supplement absent or decreased levels of a different polypeptide (e.g., hemoglobin S for hemoglobin B, SOD, catalase, DNA repair proteins), to inhibit the activity of a polypeptide (e.g., an oncogene or tumor supressor), to activate the activity of a polypeptide (e.g., by binding to a receptor), to reduce the activity of a membrane bound receptor by competing with it for free ligand (e.g., soluble TNF receptors used in reducing inflammation), or to bring about a desired response (e.g., blood vessel growth inhibition, enhancement of the immune response to proliferative cells or tissues).

[0608] Similarly, antibodies directed to a polypeptide of the present invention can also be used to treat disease (as described supra, and elsewhere herein). For example, administration of an antibody directed to a polypeptide of the present invention can bind, and/or neutralize the polypeptide, and/or reduce overproduction of the polypeptide. Similarly, administration of an antibody can activate the polypeptide, such as by binding to a polypeptide bound to a membrane (receptor).

[0609] At the very least, the polypeptides of the present invention can be used as molecular weight markers on SDS-PAGE gels or on molecular sieve gel filtration columns using methods well known to those of skill in the art. Polypeptides can also be used to raise antibodies, which in turn are used to measure protein expression from a recombinant cell, as a way of assessing transformation of the host cell. Moreover, the polypeptides of the present invention can be used to test the biological activities described herein.

Diagnostic Assays

[0610] The compounds of the present invention are useful for diagnosis, treatment, prevention and/or prognosis of various disorders in mammals, preferably humans. Such disorders include, but are not limited to, those described in the legends for Tables 1D and 1E and as indicated in the “Preferred Indications” columns in Table 1C and Table 1C; and, also as described herein under the section heading “Biological Activities”.

[0611] For a number of disorders, substantially altered (increased or decreased) levels of gene expression can be detected in tissues, cells or bodily fluids (e.g., sera, plasma, urine, semen, synovial fluid or spinal fluid) taken from an individual having such a disorder, relative to a “standard” gene expression level, that is, the expression level in tissues or bodily fluids from an individual not having the disorder. Thus, the invention provides a diagnostic method useful during diagnosis of a disorder, which involves measuring the expression level of the gene encoding the polypeptide in tissues, cells or body fluid from an individual and comparing the measured gene expression level with a standard gene expression level, whereby an increase or decrease in the gene expression level(s) compared to the standard is indicative of a disorder. These diagnostic assays may be performed in vivo or in vitro, such as, for example, on blood samples, biopsy tissue or autopsy tissue.

[0612] The present invention is also useful as a prognostic indicator, whereby patients exhibiting enhanced or depressed gene expression will experience a worse clinical outcome relative to patients expressing the gene at a level nearer the standard level.

[0613] In certain embodiments, a polypeptide of the invention, or polynucleotides, antibodies, agonists, or antagonists corresponding to that polypeptide, may be used to diagnose and/or prognose diseases and/or disorders associated with the tissue(s) in which the polypeptide of the invention is expressed, including one, two, three, four, five, or more tissues disclosed in Table 1B, column 8 (Tissue Distribution Library Code).

[0614] By “assaying the expression level of the gene encoding the polypeptide” is intended qualitatively or quantitatively measuring or estimating the level of the polypeptide of the invention or the level of the mRNA encoding the polypeptide of the invention in a first biological sample either directly (e.g., by determining or estimating absolute protein level or mRNA level) or relatively (e.g., by comparing to the polypeptide level or mRNA level in a second biological sample). Preferably, the polypeptide expression level or mRNA level in the first biological sample is measured or estimated and compared to a standard polypeptide level or mRNA level, the standard being taken from a second biological sample obtained from an individual not having the disorder or being determined by averaging levels from a population of individuals not having the disorder. As will be appreciated in the art, once a standard polypeptide level or mRNA level is known, it can be used repeatedly as a standard for comparison.

[0615] By “biological sample” is intended any biological sample obtained from an individual, cell line, tissue culture, or other source containing polypeptides of the invention (including portions thereof) or mRNA. As indicated, biological samples include body fluids (such as sera, plasma, urine, synovial fluid and spinal fluid) and tissue sources found to express the full length or fragments thereof of a polypeptide or mRNA. Methods for obtaining tissue biopsies and body fluids from mammals are well known in the art. Where the biological sample is to include mRNA, a tissue biopsy is the preferred source.

[0616] Total cellular RNA can be isolated from a biological sample using any suitable technique such as the single-step guanidinium-thiocyanate-phenol-chloroform method described in Chomczynski and Sacchi, Anal. Biochem. 162:156-159 (1987). Levels of mRNA encoding the polypeptides of the invention are then assayed using any appropriate method. These include Northern blot analysis, S1 nuclease mapping, the polymerase chain reaction (PCR), reverse transcription in combination with the polymerase chain reaction (RT-PCR), and reverse transcription in combination with the ligase chain reaction (RT-LCR).

[0617] The present invention also relates to diagnostic assays such as quantitative and diagnostic assays for detecting levels of polypeptides of the invention, in a biological sample (e.g., cells and tissues), including determination of normal and abnormal levels of polypeptides. Thus, for instance, a diagnostic assay in accordance with the invention for detecting over-expression of polypeptides of the invention compared to normal control tissue samples may be used to detect the presence of tumors. Assay techniques that can be used to determine levels of a polypeptide, such as a polypeptide of the present invention in a sample derived from a host are well-known to those of skill in the art. Such assay methods include radioimmunoassays, competitive-binding assays, Western Blot analysis and ELISA assays. Assaying polypeptide levels in a biological sample can occur using any art-known method.

[0618] Assaying polypeptide levels in a biological sample can occur using antibody-based techniques. For example, polypeptide expression in tissues can be studied with classical immunohistological methods (Jalkanen et al., J. Cell. Biol. 101:976-985 (1985); Jalkanen, M., et al., J. Cell. Biol. 105:3087-3096 (1987)). Other antibody-based methods useful for detecting polypeptide gene expression include immunoassays, such as the enzyme linked immunosorbent assay (ELISA) and the radioimmunoassay (RIA). Suitable antibody assay labels are known in the art and include enzyme labels, such as, glucose oxidase, and radioisotopes, such as iodine (¹²⁵I, ¹²¹I), carbon (¹⁴C), sulfur (³⁵S), tritium (³H), indium (¹¹²In), and technetium (^{99m}Tc), and fluorescent labels, such as fluorescein and rhodamine, and biotin.

[0619] The tissue or cell type to be analyzed will generally include those which are known, or suspected, to express the gene of inteest (such as, for example, cancer). The protein isolation methods employed herein may, for example, be such as those described in Harlow and Lane (Harlow, E. and Lane, D., 1988, “Antibodies: A Laboratory Manual”, Cold Spring Harbor Laboratory Press, Cold Spring Harbor, N.Y.), which is incorporated herein by reference in its entirety. The isolated cells can be derived from cell culture or from a patient. The analysis of cells taken from culture may be a necessary step in the assessment of cells that could be used as part of a cell-based gene therapy technique or, alternatively, to test the effect of compounds on the expression of the gene.

[0620] For example, antibodies, or fragments of antibodies, such as those described herein, may be used to quantitatively or qualitatively detect the presence of gene products or conserved variants or peptide fragments thereof. This can be accomplished, for example, by immunofluorescence techniques employing a fluorescently labeled antibody coupled with light microscopic, flow cytometric, or fluorimetric detection.

[0621] In a preferred embodiment, antibodies, or fragments of antibodies directed to any one or all of the predicted epitope domains of the polypeptides of the invention (shown in column 7 of Table 1B) may be used to quantitatively or qualitatively detect the presence of gene products or conserved variants or peptide fragments thereof. This can be accomplished, for example, by immunofluorescence techniques employing a fluorescently labeled antibody coupled with light microscopic, flow cytometric, or fluorimetric detection.

[0622] In an additional preferred embodiment, antibodies, or fragments of antibodies directed to a conformational epitope of a polypeptide of the invention may be used to quantitatively or qualitatively detect the presence of gene products or conserved variants or peptide fragments thereof. This can be accomplished, for example, by immunofluorescence techniques employing a fluorescently labeled antibody coupled with light microscopic, flow cytometric, or fluorimetric detection.

[0623] The antibodies (or fragments thereof), and/or polypeptides of the present invention may, additionally, be employed histologically, as in immunofluorescence, immunoelectron microscopy or non-immunological assays, for in situ detection of gene products or conserved variants or peptide fragments thereof. In situ detection may be accomplished by removing a histological specimen from a patient, and applying thereto a labeled antibody or polypeptide of the present invention. The antibody (or fragment thereof) or polypeptide is preferably applied by overlaying the labeled antibody (or fragment) onto a biological sample. Through the use of such a procedure, it is possible to determine not only the presence of the gene product, or conserved variants or peptide fragments, or polypeptide binding, but also its distribution in the examined tissue. Using the present invention, those of ordinary skill will readily perceive that any of a wide variety of histological methods (such as staining procedures) can be modified in order to achieve such in situ detection.

[0624] Immunoassays and non-immunoassays for gene products or conserved variants or peptide fragments thereof will typically comprise incubating a sample, such as a biological fluid, a tissue extract, freshly harvested cells, or lysates of cells which have been incubated in cell culture, in the presence of a detectably labeled antibody capable of binding gene products or conserved variants or peptide fragments thereof, and detecting the bound antibody by any of a number of techniques well-known in the art.

[0625] The biological sample may be brought in contact with and immobilized onto a solid phase support or carrier such as nitrocellulose, or other solid support which is capable of immobilizing cells, cell particles or soluble proteins. The support may then be washed with suitable buffers followed by treatment with the detectably labeled antibody or detectable polypeptide of the invention. The solid phase support may then be washed with the buffer a second time to remove unbound antibody or polypeptide. Optionally the antibody is subsequently labeled. The amount of bound label on solid support may then be detected by conventional means.

[0626] By “solid phase support or carrier” is intended any support capable of binding an antigen or an antibody. Well-known supports or carriers include glass, polystyrene, polypropylene, polyethylene, dextran, nylon, amylases, natural and modified celluloses, polyacrylamides, gabbros, and magnetite. The nature of the carrier can be either soluble to some extent or insoluble for the purposes of the present invention. The support material may have virtually any possible structural configuration so long as the coupled molecule is capable of binding to an antigen or antibody. Thus, the support configuration may be spherical, as in a bead, or cylindrical, as in the inside surface of a test tube, or the external surface of a rod. Alternatively, the surface may be flat such as a sheet, test strip, etc. Preferred supports include polystyrene beads. Those skilled in the art will know many other suitable carriers for binding antibody or antigen, or will be able to ascertain the same by use of routine experimentation.

[0627] The binding activity of a given lot of antibody or antigen polypeptide may be determined according to well known methods. Those skilled in the art will be able to determine operative and optimal assay conditions for each determination by employing routine experimentation.

[0628] In addition to assaying polypeptide levels or polynucleotide levels in a biological sample obtained from an individual, polypeptide or polynucleotide can also be detected in vivo by imaging. For example, in one embodiment of the invention, polypeptides and/or antibodies of the invention are used to image diseased cells, such as neoplasms. In another embodiment, polynucleotides of the invention (e.g., polynucleotides complementary to all or a portion of an mRNA) and/or antibodies (e.g., antibodies directed to any one or a combination of the epitopes of a polypeptide of the invention, antibodies directed to a conformational epitope of a polypeptide of the invention, or antibodies directed to the full length polypeptide expressed on the cell surface of a mammalian cell) are used to image diseased or neoplastic cells.

[0629] Antibody labels or markers for in vivo imaging of polypeptides of the invention include those detectable by X-radiography, NMR, MRI, CAT-scans or ESR. For X-radiography, suitable labels include radioisotopes such as barium or cesium, which emit detectable radiation but are not overtly harmful to the subject. Suitable markers for NMR and ESR include those with a detectable characteristic spin, such as deuterium, which may be incorporated into the antibody by labeling of nutrients for the relevant hybridoma. Where in vivo imaging is used to detect enhanced levels of polypeptides for diagnosis in humans, it may be preferable to use human antibodies or “humanized” chimeric monoclonal antibodies. Such antibodies can be produced using techniques described herein or otherwise known in the art. For example methods for producing chimeric antibodies are known in the art. See, for review, Morrison, Science 229:1202 (1985); Oi et al., BioTechniques 4:214 (1986); Cabilly et al., U.S. Pat. No. 4,816,567; Taniguchi et al., EP 171496; Morrison et al., EP 173494; Neuberger et al., WO 8601533; Robinson et al., WO 8702671; Boulianne et al., Nature 312:643 (1984); Neuberger et al., Nature 314:268 (1985).

[0630] Additionally, any polypeptides of the invention whose presence can be detected, can be administered. For example, polypeptides of the invention labeled with a radio-opaque or other appropriate compound can be administered and visualized in vivo, as discussed, above for labeled antibodies. Further, such polypeptides can be utilized for in vitro diagnostic procedures.

[0631] A polypeptide-specific antibody or antibody fragment which has been labeled with an appropriate detectable imaging moiety, such as a radioisotope (for example, ¹³¹I, ¹¹²In, ^{99m}Tc), a radio-opaque substance, or a material detectable by nuclear magnetic resonance, is introduced (for example, parenterally, subcutaneously or intraperitoneally) into the mammal to be examined for a disorder. It will be understood in the art that the size of the subject and the imaging system used will determine the quantity of imaging moiety needed to produce diagnostic images. In the case of a radioisotope moiety, for a human subject, the quantity of radioactivity injected will normally range from about 5 to 20 millicuries of ^{99m}Tc. The labeled antibody or antibody fragment will then preferentially accumulate at the location of cells which contain the antigenic protein. In vivo tumor imaging is described in S. W. Burchiel et al., “Immunopharmacokinetics of Radiolabeled Antibodies and Their Fragments” (Chapter 13 in Tumor Imaging: The Radiochemical Detection of Cancer, S. W. Burchiel and B. A. Rhodes, eds., Masson Publishing Inc. (1982)).

[0632] With respect to antibodies, one of the ways in which an antibody of the present invention can be detectably labeled is by linking the same to a reporter enzyme and using the linked product in an enzyme immunoassay (EIA) (Voller, A., “The Enzyme Linked Immunosorbent Assay (ELISA)”, 1978, Diagnostic Horizons 2:1-7, Microbiological Associates Quarterly Publication, Walkersville, Md.); Voller et al., J. Clin. Pathol. 31:507-520 (1978); Butler, J. E., Meth. Enzymol. 73:482-523 (1981); Maggio, E. (ed.), 1980, Enzyme Immunoassay, CRC Press, Boca Raton, Fla.,; Ishikawa, E. et al., (eds.), 1981, Enzyme Immunoassay, Kgaku Shoin, Tokyo). The reporter enzyme which is bound to the antibody will react with an appropriate substrate, preferably a chromogenic substrate, in such a manner as to produce a chemical moiety which can be detected, for example, by spectrophotometric, fluorimetric or by visual means. Reporter enzymes which can be used to detectably label the antibody include, but are not limited to, malate dehydrogenase, staphylococcal nuclease, delta-5-steroid isomerase, yeast alcohol dehydrogenase, alpha-glycerophosphate, dehydrogenase, triose phosphate isomerase, horseradish peroxidase, alkaline phosphatase, asparaginase, glucose oxidase, beta-galactosidase, ribonuclease, urease, catalase, glucose-6-phosphate dehydrogenase, glucoamylase and acetylcholinesterase. Additionally, the detection can be accomplished by colorimetric methods which employ a chromogenic substrate for the reporter enzyme. Detection may also be accomplished by visual comparison of the extent of enzymatic reaction of a substrate in comparison with similarly prepared standards.

[0633] Detection may also be accomplished using any of a variety of other immunoassays. For example, by radioactively labeling the antibodies or antibody fragments, it is possible to detect polypeptides through the use of a radioimmunoassay (RIA) (see, for example, Weintraub, B., Principles of Radioimmunoassays, Seventh Training Course on Radioligand Assay Techniques, The Endocrine Society, March, 1986, which is incorporated by reference herein). The radioactive isotope can be detected by means including, but not limited to, a gamma counter, a scintillation counter, or autoradiography.

[0634] It is also possible to label the antibody with a fluorescent compound. When the fluorescently labeled antibody is exposed to light of the proper wave length, its presence can then be detected due to fluorescence. Among the most commonly used fluorescent labeling compounds are fluorescein isothiocyanate, rhodamine, phycoerythrin, phycocyanin, allophycocyanin, ophthaldehyde and fluorescamine.

[0635] The antibody can also be detectably labeled using fluorescence emitting metals such as ¹⁵²Eu, or others of the lanthanide series. These metals can be attached to the antibody using such metal chelating groups as diethylenetriaminepentacetic acid (DTPA) or ethylenediaminetetraacetic acid (EDTA).

[0636] The antibody also can be detectably labeled by coupling it to a chemiluminescent compound. The presence of the chemiluminescent-tagged antibody is then determined by detecting the presence of luminescence that arises during the course of a chemical reaction. Examples of particularly useful chemiluminescent labeling compounds are luminol, isoluminol, theromatic acridinium ester, imidazole, acridinium salt and oxalate ester.

[0637] Likewise, a bioluminescent compound may be used to label the antibody of the present invention. Bioluminescence is a type of chemiluminescence found in biological systems in, which a catalytic protein increases the efficiency of the chemiluminescent reaction. The presence of a bioluminescent protein is determined by detecting the presence of luminescence. Important bioluminescent compounds for purposes of labeling are luciferin, luciferase and aequorin.

Methods for Detecting Diseases

[0638] In general, a disease may be detected in a patient based on the presence of one or more proteins of the invention and/or polynucleotides encoding such proteins in a biological sample (for example, blood, sera, urine, and/or tumor biopsies) obtained from the patient. In other words, such proteins may be used as markers to indicate the presence or absence of a disease or disorder, including cancer and/or as described elsewhere herein. In addition, such proteins may be useful for the detection of other diseases and cancers. The binding agents provided herein generally permit detection of the level of antigen that binds to the agent in the biological sample. Polynucleotide primers and probes may be used to detect the level of mRNA encoding polypeptides of the invention, which is also indicative of the presence or absence of a disease or disorder, including cancer. In general, polypeptides of the invention should be present at a level that is at least three fold higher in diseased tissue than in normal tissue.

[0639] There are a variety of assay formats known to those of ordinary skill in the art for using a binding agent to detect polypeptide markers in a sample. See, e.g., Harlow and Lane, supra. In general, the presence or absence of a disease in a patient may be determined by (a) contacting a biological sample obtained from a patient with a binding agent; (b) detecting in the sample a level of polypeptide that binds to the binding agent; and (c) comparing the level of polypeptide with a predetermined cut-off value.

[0640] In a preferred embodiment, the assay involves the use of a binding agent(s) immobilized on a solid support to bind to and remove the polypeptide of the invention from the remainder of the sample. The bound polypeptide may then be detected using a detection reagent that contains a reporter group and specifically binds to the binding agent/polypeptide complex. Such detection reagents may comprise, for example, a binding agent that specifically binds to the polypeptide or an antibody or other agent that specifically binds to the binding agent, such as an anti-immunoglobulin, protein G, protein A or a lectin. Alternatively, a competitive assay may be utilized, in which a polypeptide is labeled with a reporter group and allowed to bind to the immobilized binding agent after incubation of the binding agent with the sample. The extent to which components of the sample inhibit the binding of the labeled polypeptide to the binding agent is indicative of the reactivity of the sample with the immobilized binding agent. Suitable polypeptides for use within such assays include polypeptides of the invention and portions thereof, or antibodies, to which the binding agent binds, as described above.

[0641] The solid support may be any material known to those of skill in the art to which polypeptides of the invention may be attached. For example, the solid support may be a test well in a microtiter plate or a nitrocellulose or other suitable membrane. Alternatively, the support may be a bead or disc, such as glass fiberglass, latex or a plastic material such as polystyrene or polyvinylchloride. The support may also be a magnetic particle or a fiber optic sensor, such as those disclosed, for example, in U.S. Pat. No. 5,359,681. The binding agent may be immobilized on the solid support using a variety of techniques known to those of skill in the art, which are amply described in the patent and scientific literature. In the context of the present invention, the term “immobilization” refers to both noncovalent association, such as adsorption, and covalent attachment (which may be a direct linkage between the agent and functional groups on the support or may be a linkage by way of a cross-linking agent). Immobilization by adsorption to a well in a microtiter plate or to a membrane is preferred. In such cases, adsorption may be achieved by contacting the binding agent, in a suitable buffer, with the solid support for the suitable amount of time. The contact time varies with temperature, but is typically between about 1 hour and about 1 day. In general, contacting a well of plastic microtiter plate (such as polystyrene or polyvinylchloride) with an amount of binding agent ranging from about 10 ng to about 10 ug, and preferably about 100 ng to about 1 ug, is sufficient to immobilize an adequate amount of binding agent.

[0642] Covalent attachment of binding agent to a solid support may generally be achieved by first reacting the support with a bifunctional reagent that will react with both the support and a functional group, such as a hydroxyl or amino group, on the binding agent. For example, the binding agent may be covalently attached to supports having an appropriate polymer coating using benzoquinone or by condensation of an aldehyde group on the support with an amine and an active hydrogen on the binding partner (see, e.g., Pierce Immunotechnology Catalog and Handbook, 1991, at A12-A13).

Gene Therapy Methods

[0643] Also encompassed by the invention are gene therapy methods for treating or preventing disorders, diseases and conditions. The gene therapy methods relate to the introduction of nucleic acid (DNA, RNA and antisense DNA or RNA) sequences into an animal to achieve expression of the polypeptide of the present invention. This method requires a polynucleotide which codes for a polypeptide of the present invention operatively linked to a promoter and any other genetic elements necessary for the expression of the polypeptide by the target tissue. Such gene therapy and delivery techniques are known in the art, see, for example, WO90/11092, which is herein incorporated by reference.

[0644] Thus, for example, cells from a patient may be engineered with a polynucleotide (DNA or RNA) comprising a promoter operably linked to a polynucleotide of the present invention ex vivo, with the engineered cells then being provided to a patient to be treated with the polypeptide of the present invention. Such methods are well-known in the art. For example, see Belldegrun, A., et al., J. Natl. Cancer Inst. 85: 207-216 (1993); Ferrantini, M. et al., Cancer Research 53: 1107-1112 (1993); Ferrantini, M. et al., J. Immunology 153: 4604-4615 (1994); Kaido, T., et al., Int. J. Cancer 60: 221-229 (1995); Ogura, H., et al., Cancer Research 50: 5102-5106 (1990); Santodonato, L., et al., Human Gene Therapy 7:1-10 (1996); Santodonato, L., et al., Gene Therapy 4:1246-1255 (1997); and Zhang, J.-F. et al., Cancer Gene Therapy 3: 31-38 (1996)), which are herein incorporated by reference. In one embodiment, the cells which are engineered are arterial cells. The arterial cells may be reintroduced into the patient through direct injection to the artery, the tissues surrounding the artery, or through catheter injection.

[0645] As discussed in more detail below, the polynucleotide constructs can be delivered by any method that delivers injectable materials to the cells of an animal, such as, injection into the interstitial space of tissues (heart, muscle, skin, lung, liver, and the like). The polynucleotide constructs may be delivered in a pharmaceutically acceptable liquid or aqueous carrier.

[0646] In one embodiment, the polynucleotide of the present invention is delivered as a naked polynucleotide. The term “naked” polynucleotide, DNA or RNA refers to sequences that are free from any delivery vehicle that acts to assist, promote or facilitate entry into the cell, including viral sequences, viral particles, liposome formulations, lipofectin or precipitating agents and the like. However, the polynucleotide of the present invention can also be delivered in liposome formulations and lipofectin formulations and the like can be prepared by methods well known to those skilled in the art. Such methods are described, for example, in U.S. Pat. Nos. 5,593,972, 5,589,466, and 5,580,859, which are herein incorporated by reference.

[0647] The polynucleotide vector constructs used in the gene therapy method are preferably constructs that will not integrate into the host genome nor will they contain sequences that allow for replication. Appropriate vectors include pWLNEO, pSV2CAT, pOG44, pXT1 and pSG available from Stratagene; pSVK3, pBPV, pMSG and pSVL available from Pharmacia; and pEF1/V5, pcDNA3.1, and pRc/CMV2 available from Invitrogen. Other suitable vectors will be readily apparent to the skilled artisan.

[0648] Any strong promoter known to those skilled in the art can be used for driving the expression of the polynucleotide sequence. Suitable promoters include adenoviral promoters, such as the adenoviral major late promoter; or heterologous promoters, such as the cytomegalovirus (CMV) promoter; the respiratory syncytial virus (RSV) promoter; inducible promoters, such as the MMT promoter, the metallothionein promoter; heat shock promoters; the albumin promoter; the ApoAI promoter; human globin promoters; viral thymidine kinase promoters, such as the Herpes Simplex thymidine kinase promoter; retroviral LTRs; the b-actin promoter; and human growth hormone promoters. The promoter also may be the native promoter for the polynucleotide of the present invention.

[0649] Unlike other gene therapy techniques, one major advantage of introducing naked nucleic acid sequences into target cells is the transitory nature of the polynucleotide synthesis in the cells. Studies have shown that non-replicating DNA sequences can be introduced into cells to provide production of the desired polypeptide for periods of up to six months.

[0650] The polynucleotide construct can be delivered to the interstitial space of tissues within the an animal, including of muscle, skin, brain, lung, liver, spleen, bone marrow, thymus, heart, lymph, blood, bone, cartilage, pancreas, kidney, gall bladder, stomach, intestine, testis, ovary, uterus, rectum, nervous system, eye, gland, and connective tissue. Interstitial space of the tissues comprises the intercellular, fluid, mucopolysaccharide matrix among the reticular fibers of organ tissues, elastic fibers in the walls of vessels or chambers, collagen fibers of fibrous tissues, or that same matrix within connective tissue ensheathing muscle cells or in the lacunae of bone. It is similarly the space occupied by the plasma of the circulation and the lymph fluid of the lymphatic channels. Delivery to the interstitial space of muscle tissue is preferred for the reasons discussed below. They may be conveniently delivered by injection into the tissues comprising these cells. They are preferably delivered to and expressed in persistent, non-dividing cells which are differentiated, although delivery and expression may be achieved in non-differentiated or less completely differentiated cells, such as, for example, stem cells of blood or skin fibroblasts. In vivo muscle cells are particularly competent in their ability to take up and express polynucleotides.

[0651] For the naked nucleic acid sequence injection, an effective dosage amount of DNA or RNA will be in the range of from about 0.05 mg/kg body weight to about 50 mg/kg body weight. Preferably the dosage will be from about 0.005 mg/kg to about 20 mg/kg and more preferably from about 0.05 mg/kg to about 5 mg/kg. Of course, as the artisan of ordinary skill will appreciate, this dosage will vary according to the tissue site of injection. The appropriate and effective dosage of nucleic acid sequence can readily be determined by those of ordinary skill in the art and may depend on the condition being treated and the route of administration.

[0652] The preferred route of administration is by the parenteral route of injection into the interstitial space of tissues. However, other parenteral routes may also be used, such as, inhalation of an aerosol formulation particularly for delivery to lungs or bronchial tissues, throat or mucous membranes of the nose. In addition, naked DNA constructs can be delivered to arteries during angioplasty by the catheter used in the procedure.

[0653] The naked polynucleotides are delivered by any method known in the art, including, but not limited to, direct needle injection at the delivery site, intravenous injection, topical administration, catheter infusion, and so-called “gene guns”. These delivery methods are known in the art.

[0654] The constructs may also be delivered with delivery vehicles such as viral sequences, viral particles, liposome formulations, lipofectin, precipitating agents, etc. Such methods of delivery are known in the art.

[0655] In certain embodiments, the polynucleotide constructs are complexed in a liposome preparation. Liposomal preparations for use in the instant invention include cationic (positively charged), anionic (negatively charged) and neutral preparations. However, cationic liposomes are particularly preferred because a tight charge complex can be formed between the cationic liposome and the polyanionic nucleic acid. Cationic liposomes have been shown to mediate intracellular delivery of plasmid DNA (Felgner et al., Proc. Natl. Acad. Sci. USA (1987) 84:7413-7416, which is herein incorporated by reference); mRNA (Malone et al., Proc. Natl. Acad. Sci. USA (1989) 86:6077-6081, which is herein incorporated by reference); and purified transcription factors (Debs et al., J. Biol. Chem. (1990) 265:10189-10192, which is herein incorporated by reference), in functional form.

[0656] Cationic liposomes are readily available. For example, N[1-2,3-dioleyloxy)propyl]-N,N,N-triethylammonium (DOTMA) liposomes are particularly useful and are available under the trademark Lipofectin, from GIBCO BRL, Grand Island, N.Y. (See, also, Felgner et al., Proc. Natl Acad. Sci. USA (1987) 84:7413-7416, which is herein incorporated by reference). Other commercially available liposomes include transfectace (DDAB/DOPE) and DOTAP/DOPE (Boehringer).

[0657] Other cationic liposomes can be prepared from readily available materials using techniques well known in the art. See, e.g. PCT Publication No. WO 90/11092 (which is herein incorporated by reference) for a description of the synthesis of DOTAP (1,2-bis(oleoyloxy)-3-(trimethylammonio)propane) liposomes. Preparation of DOTMA liposomes is explained in the literature, see, e.g., P. Felgner et al., Proc. Natl. Acad. Sci. USA 84:7413-7417, which is herein incorporated by reference. Similar methods can be used to prepare liposomes from other cationic lipid materials.

[0658] Similarly, anionic and neutral liposomes are readily available, such as from Avanti Polar Lipids (Birmingham, Ala.), or can be easily prepared using readily available materials. Such materials include phosphatidyl, choline, cholesterol, phosphatidyl ethanolamine, dioleoylphosphatidyl choline (DOPC), dioleoylphosphatidyl glycerol (DOPG), dioleoylphoshatidyl ethanolamine (DOPE), among others. These materials can also be mixed with the DOTMA and DOTAP starting materials in appropriate ratios. Methods for making liposomes using these materials are well known in the art.

[0659] For example, commercially dioleoylphosphatidyl choline (DOPC), dioleoylphosphatidyl glycerol (DOPG), and dioleoylphosphatidyl ethanolamine (DOPE) can be used in various combinations to make conventional liposomes, with or without the addition of cholesterol. Thus, for example, DOPG/DOPC vesicles can be prepared by drying 50 mg each of DOPG and DOPC under a stream of nitrogen gas into a sonication vial. The sample is placed under a vacuum pump overnight and is hydrated the following day with deionized water. The sample is then sonicated for 2 hours in a capped vial, using a Heat Systems model 350 sonicator equipped with an inverted cup (bath type) probe at the maximum setting while the bath is circulated at 15EC. Alternatively, negatively charged vesicles can be prepared without sonication to produce multilamellar vesicles or by extrusion through nucleopore membranes to produce unilamellar vesicles of discrete size. Other methods are known and available to those of skill in the art.

[0660] The liposomes can comprise multilamellar vesicles (MLVs), small unilamellar vesicles (SUVs), or large unilamellar vesicles (LUVs), with SUVs being preferred. The various liposome-nucleic acid complexes are prepared using methods well known in the art. See, e.g., Straubinger et al., Methods of Immunology (1983), 101:512-527, which is herein incorporated by reference. For example, MLVs containing nucleic acid can be prepared by depositing a thin film of phospholipid on the walls of a glass tube and subsequently hydrating with a solution of the material to be encapsulated. SUVs are prepared by extended sonication of MLVs to produce a homogeneous population of unilamellar liposomes. The material to be entrapped is added to a suspension of preformed MLVs and then sonicated. When using liposomes containing cationic lipids, the dried lipid film is resuspended in an appropriate solution such as sterile water or an isotonic buffer solution such as 10 mM Tris/NaCl, sonicated, and then the preformed liposomes are mixed directly with the DNA. The liposome and DNA form a very stable complex due to binding of the positively charged liposomes to the cationic DNA. SUVs find use with small nucleic acid fragments. LUVs are prepared by a number of methods, well known in the art. Commonly used methods include Ca²⁺-EDTA chelation (Papahadjopoulos et al., Biochim. Biophys. Acta (1975) 394:483; Wilson et al., Cell 17:77 (1979)); ether injection (Deamer, D. and Bangham, A., Biochim. Biophys. Acta 443:629 (1976); Ostro et al., Biochem. Biophys. Res. Commun. 76:836 (1977); Fraley et al., Proc. Natl. Acad. Sci. USA 76:3348 (1979)); detergent dialysis (Enoch, H. and Strittmatter, P., Proc. Natl. Acad. Sci. USA 76:145 (1979)); and reverse-phase evaporation (REV) (Fraley et al., J. Biol. Chem. 255:10431 (1980); Szoka, F. and Papahadjopoulos, D., Proc. Natl. Acad. Sci. USA 75:145 (1978); Schaefer-Ridder et al., Science 215:166 (1982)), which are herein incorporated by reference.

[0661] Generally, the ratio of DNA to liposomes will be from about 10:1 to about 1:10. Preferably, the ration will be from about 5:1 to about 1:5. More preferably, the ration will be about 3:1 to about 1:3. Still more preferably, the ratio will be about 1:1.

[0662] U.S. Pat. No. 5,676,954 (which is herein incorporated by reference) reports on the injection of genetic material, complexed with cationic liposomes carriers, into mice. U.S. Pat. Nos. 4,897,355, 4,946,787, 5,049,386, 5,459,127, 5,589,466, 5,693,622, 5,580,859, 5,703,055, and international publication no. WO 94/9469 (which are herein incorporated by reference) provide cationic lipids for use in transfecting DNA into cells and mammals. U.S. Pat. Nos. 5,589,466, 5,693,622, 5,580,859, 5,703,055, and international publication no. WO 94/9469 provide methods for delivering DNA-cationic lipid complexes to mammals.

[0663] In certain embodiments, cells are engineered, ex vivo or in vivo, using a retroviral particle containing RNA which comprises a sequence encoding a polypeptide of the present invention. Retroviruses from which the retroviral plasmid vectors may be derived include, but are not limited to, Moloney Murine Leukemia Virus, spleen necrosis virus, Rous sarcoma Virus, Harvey Sarcoma Virus, avian leukosis virus, gibbon ape leukemia virus, human immunodeficiency virus, Myeloproliferative Sarcoma Virus, and mammary tumor virus.

[0664] The retroviral plasmid vector is employed to transduce packaging cell lines to form producer cell lines. Examples of packaging cells which may be transfected include, but are not limited to, the PE501, PA317, R-2, R-AM, PA12, T19-14X, VT-19-17-H2, RCRE, RCRIP, GP+E-86, GP+envAm12, and DAN cell lines as described in Miller, Human Gene Therapy 1:5-14 (1990), which is incorporated herein by reference in its entirety. The vector may transduce the packaging cells through any means known in the art. Such means include, but are not limited to, electroporation, the use of liposomes, and CaPO₄ precipitation. In one alternative, the retroviral plasmid vector may be encapsulated into a liposome, or coupled to a lipid, and then administered to a host.

[0665] The producer cell line generates infectious retroviral vector particles which include polynucleotide encoding a polypeptide of the present invention. Such retroviral vector particles then may be employed, to transduce eukaryotic cells, either in vitro or in vivo. The transduced eukaryotic cells will express a polypeptide of the present invention.

[0666] In certain other embodiments, cells are engineered, ex vivo or in vivo, with polynucleotide contained in an adenovirus vector. Adenovirus can be manipulated such that it encodes and expresses a polypeptide of the present invention, and at the same time is inactivated in terms of its ability to replicate in a normal lytic viral life cycle. Adenovirus expression is achieved without integration of the viral DNA into the host cell chromosome, thereby alleviating concerns about insertional mutagenesis. Furthermore, adenoviruses have been used as live enteric vaccines for many years with an excellent safety profile (Schwartz et al. Am. Rev. Respir. Dis.109:233-238 (1974)). Finally, adenovirus mediated gene transfer has been demonstrated in a number of instances including transfer of alpha-1-antitrypsin and CFTR to the lungs of cotton rats (Rosenfeld, M. A. et al. (1991) Science 252:431-434; Rosenfeld et al., (1992) Cell 68:143-155). Furthermore, extensive studies to attempt to establish adenovirus as a causative agent in human cancer were uniformly negative (Green, M. et al. (1979) Proc. Natl. Acad. Sci. USA 76:6606).

[0667] Suitable adenoviral vectors useful in the present invention are described, for example, in Kozarsky and Wilson, Curr. Opin. Genet. Devel. 3:499-503 (1993); Rosenfeld et al., Cell 68:143-155 (1992); Engelhardt et al., Human Genet. Ther. 4:759-769 (1993); Yang et al., Nature Genet. 7:362-369 (1994); Wilson et al., Nature 365:691-692 (1993); and U.S. Pat. No. 5,652,224, which are herein incorporated by reference. For example, the adenovirus vector Ad2 is useful and can be grown in human 293 cells. These cells contain the E1 region of adenovirus and constitutively express E1a and E1b, which complement the defective adenoviruses by providing the products of the genes deleted from the vector. In addition to Ad2, other varieties of adenovirus (e.g., Ad3, Ad5, and Ad7) are also useful in the present invention.

[0668] Preferably, the adenoviruses used in the present invention are replication deficient. Replication deficient adenoviruses require the aid of a helper virus and/or packaging cell line to form infectious particles. The resulting virus is capable of infecting cells and can express a polynucleotide of interest which is operably linked to a promoter, but cannot replicate in most cells. Replication deficient adenoviruses may be deleted in one or more of all or a portion of the following genes: E1a, E1b, E3, E4, E2a, or L1 through L5.

[0669] In certain other embodiments, the cells are engineered, ex vivo or in vivo, using an adeno-associated virus (AAV). AAVs are naturally occurring defective viruses that require helper viruses to produce infectious particles (Muzyczka, N., Curr. Topics in Microbiol. Immunol. 158:97 (1992)). It is also one of the few viruses that may integrate its DNA into non-dividing cells. Vectors containing as little as 300 base pairs of AAV can be packaged and can integrate, but space for exogenous DNA is limited to about 4.5 kb. Methods for producing and using such AAVs are known in the art. See, for example, U.S. Pat. Nos. 5,139,941, 5,173,414, 5,354,678, 5,436,146, 5,474,935, 5,478,745, and 5,589,377.

[0670] For example, an appropriate AAV vector for use in the present invention will include all the sequences necessary for DNA replication, encapsidation, and host-cell integration. The polynucleotide construct is inserted into the AAV vector using standard cloning methods, such as those found in Sambrook et al., Molecular Cloning: A Laboratory Manual, Cold Spring Harbor Press (1989). The recombinant AAV vector is then transfected into packaging cells which are infected with a helper virus, using any standard technique, including lipofection, electroporation, calcium phosphate precipitation, etc. Appropriate helper viruses include adenoviruses, cytomegaloviruses, vaccinia viruses, or herpes viruses. Once the packaging cells are transfected and infected, they will produce infectious AAV viral particles which contain the polynucleotide construct. These viral particles are then used to transduce eukaryotic cells, either ex vivo or in vivo. The transduced cells will contain the polynucleotide construct integrated into its genome, and will express a polypeptide of the invention.

[0671] Another method of gene therapy involves operably associating heterologous control regions and endogenous polynucleotide sequences (e.g. encoding a polypeptide of the present invention) via homologous recombination (see, e.g., U.S. Pat. No. 5,641,670, issued Jun. 24, 1997; International Publication No. WO 96/29411, published Sep. 26, 1996; International Publication No. WO 94/12650, published Aug. 4, 1994; Koller et al., Proc. Natl. Acad. Sci. USA 86:8932-8935 (1989); and Zijlstra et al., Nature 342:435-438 (1989), which are herein encorporated by reference. This method involves the activation of a gene which is present in the target cells, but which is not normally expressed in the cells, or is expressed at a lower level than desired.

[0672] Polynucleotide constructs are made, using standard techniques known in the art, which contain the promoter with targeting sequences flanking the promoter. Suitable promoters are described herein. The targeting sequence is sufficiently complementary to an endogenous sequence to permit homologous recombination of the promoter-targeting sequence with the endogenous sequence. The targeting sequence will be sufficiently near the 5′ end of the desired endogenous polynucleotide sequence so the promoter will be operably linked to the endogenous sequence upon homologous recombination.

[0673] The promoter and the targeting sequences can be amplified using PCR. Preferably, the amplified promoter contains distinct restriction enzyme sites on the 5′ and 3′ ends. Preferably, the 3′ end of the first targeting sequence contains the same restriction enzyme site as the 5′ end of the amplified promoter and the 5′ end of the second targeting sequence contains the same restriction site as the 3′ end of the amplified promoter. The amplified promoter and targeting sequences are digested and ligated together.

[0674] The promoter-targeting sequence construct is delivered to the cells, either as naked polynucleotide, or in conjunction with transfection-facilitating agents, such as liposomes, viral sequences, viral particles, whole viruses, lipofection, precipitating agents, etc., described in more detail above. The P promoter-targeting sequence can be delivered by any method, included direct needle injection, intravenous injection, topical administration, catheter infusion, particle accelerators, etc. The methods are described in more detail below.

[0675] The promoter-targeting sequence construct is taken up by cells. Homologous recombination between the construct and the endogenous sequence takes place, such that an endogenous sequence is placed under the control of the promoter. The promoter then drives the expression of the endogenous sequence.

[0676] The polynucleotide encoding a polypeptide of the present invention may contain a secretory signal sequence that facilitates secretion of the protein. Typically, the signal sequence is positioned in the coding region of the polynucleotide to be expressed towards or at the 5′ end of the coding region. The signal sequence may be homologous or heterologous to the polynucleotide of interest and may be homologous or heterologous to the cells to be transfected. Additionally, the signal sequence may be chemically synthesized using methods known in the art.

[0677] Any mode of administration of any of the above-described polynucleotides constructs can be used so long as the mode results in the expression of one or more molecules in an amount sufficient to provide a therapeutic effect. This includes direct needle injection, systemic injection, catheter infusion, biolistic injectors, particle accelerators (i.e., “gene guns”), gelfoam sponge depots, other commercially available depot materials, osmotic pumps (e.g., Alza minipumps), oral or suppositorial solid (tablet or pill) pharmaceutical formulations, and decanting or topical applications during surgery. For example, direct injection of naked calcium phosphate-precipitated plasmid into rat liver and rat spleen or a protein-coated plasmid into the portal vein has resulted in gene expression of the foreign gene in the rat livers (Kaneda et al., Science 243:375 (1989)).

[0678] A preferred method of local administration is by direct injection. Preferably, a recombinant molecule of the present invention complexed with a delivery vehicle is administered by direct injection into or locally within the area of arteries. Administration of a composition locally within the area of arteries refers to injecting the composition centimeters and preferably, millimeters within arteries.

[0679] Another method of local administration is to contact a polynucleotide construct of the present invention in or around a surgical wound. For example, a patient can undergo surgery and the polynucleotide construct can be coated on the surface of tissue inside the wound or the construct can be injected into areas of tissue inside the wound.

[0680] Therapeutic compositions useful in systemic administration, include recombinant molecules of the present invention complexed to a targeted delivery vehicle of the present invention. Suitable delivery vehicles for use with systemic administration comprise liposomes comprising ligands for targeting the vehicle to a particular site. In specific embodiments, suitable delivery vehicles for use with systemic administration comprise liposomes comprising polypeptides of the invention for targeting the vehicle to a particular site.

[0681] Preferred methods of systemic administration, include intravenous injection, aerosol, oral and percutaneous (topical) delivery. Intravenous injections can be performed using methods standard in the art. Aerosol delivery can also be performed using methods standard in the art (see, for example, Stribling et al., Proc. Natl. Acad. Sci. USA 189:11277-11281, 1992, which is incorporated herein by reference). Oral delivery can be performed by complexing a polynucleotide construct of the present invention to a carrier capable of withstanding degradation by digestive enzymes in the gut of an animal. Examples of such carriers, include plastic capsules or tablets, such as those known in the art. Topical delivery can be performed by mixing a polynucleotide construct of the present invention with a lipophilic reagent (e.g., DMSO) that is capable of passing into the skin.

[0682] Determining an effective amount of substance to be delivered can depend upon a number of factors including, for example, the chemical structure and biological activity of the substance, the age and weight of the animal, the precise condition requiring treatment and its severity, and the route of administration. The frequency of treatments depends upon a number of factors, such as the amount of polynucleotide constructs administered per dose, as well as the health and history of the subject. The precise amount, number of doses, and timing of doses will be determined by the attending physician or veterinarian.

[0683] Therapeutic compositions of the present invention can be administered to any animal, preferably to mammals and birds. Preferred mammals include humans, dogs, cats, mice, rats, rabbits sheep, cattle, horses and pigs, with humans being particularly preferred.

Biological Activities

[0684] Polynucleotides or polypeptides, or agonists or antagonists of the present invention, can be used in assays to test for one or more biological activities. If these polynucleotides or polypeptides, or agonists or antagonists of the present invention, do exhibit activity in a particular assay, it is likely that these molecules may be involved in the diseases associated with the biological activity. Thus, the polynucleotides and polypeptides, and agonists or antagonists could be used to treat the associated disease.

[0685] Members of the secreted family of proteins are believed to be involved in biological activities associated with, for example, cellular signaling. Accordingly, compositions of the invention (including polynucleotides, polypeptides and antibodies of the invention, and fragments and variants thereof) may be used in diagnosis, prognosis, prevention and/or treatment of diseases and/or disorders associated with aberrant activity of secreted polypeptides.

[0686] In preferred embodiments, compositions of the invention (including polynucleotides, polypeptides and antibodies of the invention, and fragments and variants thereof) may be used in the diagnosis, prognosis, prevention and/or treatment of diseases and/or disorders relating to diseases and disorders of the endocrine system, the nervous system (See, for example, “Neurological Disorders” section below), and the immune system (See, for example, “Immune Activity” section below).

[0687] In certain embodiments, a polypeptide of the invention, or polynucleotides, antibodies, agonists, or antagonists corresponding to that polypeptide, may be used to diagnose and/or prognose diseases and/or disorders associated with the tissue(s) in which the polypeptide of the invention is expressed including one, two, three, four, five, or more tissues disclosed in Table 1B, column 8 (Tissue Distribution Library Code).

[0688] Thus, polynucleotides, translation products and antibodies of the invention are useful in the diagnosis, detection and/or treatment of diseases and/or disorders associated with activities that include, but are not limited to, prohormone activation, neurotransmitter activity, cellular signaling, cellular proliferation, cellular differentiation, and cell migration.

[0689] More generally, polynucleotides, translation products and antibodies corresponding to this gene may be useful for the diagnosis, prognosis, prevention and/or treatment of diseases and/or disorders associated with the following systems.

Immune Activity

[0690] Polynucleotides, polypeptides, antibodies, and/or agonists or antagonists of the present invention may be useful in treating, preventing, diagnosing and/or prognosing diseases, disorders, and/or conditions of the immune system, by, for example, activating or inhibiting the proliferation, differentiation, or mobilization (chemotaxis) of immune cells. Immune cells develop through a process called hematopoiesis, producing myeloid (platelets, red blood cells, neutrophils, and macrophages) and lymphoid (B and T lymphocytes) cells from pluripotent stem cells. The etiology of these immune diseases, disorders, and/or conditions may be genetic, somatic, such as cancer and some autoimmune diseases, acquired (e.g., by chemotherapy or toxins), or infectious. Moreover, polynucleotides, polypeptides, antibodies, and/or agonists or antagonists of the present invention can be used as a marker or detector of a particular immune system disease or disorder.

[0691] In another embodiment, a polypeptide of the invention, or polynucleotides, antibodies, agonists, or antagonists corresponding to that polypeptide, may be used to treat diseases and disorders of the immune system and/or to inhibit or enhance an immune response generated by cells associated with the tissue(s) in which the polypeptide of the invention is expressed, including one, two, three, four, five, or more tissues disclosed in Table 1B, column 8 (Tissue Distribution Library Code).

[0692] Polynucleotides, polypeptides, antibodies, and/or agonists or antagonists of the present invention may be useful in treating, preventing, diagnosing, and/or prognosing immunodeficiencies, including both congenital and acquired immunodeficiencies. Examples of B cell immunodeficiencies in which immunoglobulin levels B cell function and/or B cell numbers are decreased include: X-linked agammaglobulinemia (Bruton's disease), X-linked infantile agammaglobulinemia, X-linked immunodeficiency with hyper IgM, non X-linked immunodeficiency with hyper IgM, X-linked lymphoproliferative syndrome (XLP), agammaglobulinemia including congenital and acquired agammaglobulinemia, adult onset agammaglobulinemia, late-onset agammaglobulinemia, dysgammaglobulinemia, hypogammaglobulinemia, unspecified hypogammaglobulinemia, recessive agammaglobulinemia (Swiss type), Selective IgM deficiency, selective IgA deficiency, selective IgG subclass deficiencies, IgG subclass deficiency (with or without IgA deficiency), Ig deficiency with increased IgM, IgG and IgA deficiency with increased IgM, antibody deficiency with normal or elevated Igs, Ig heavy chain deletions, kappa chain deficiency, B cell lymphoproliferative disorder (BLPD), common variable immunodeficiency (CVID), common variable immunodeficiency (CVI) (acquired), and transient hypogammaglobulinemia of infancy.

[0693] In specific embodiments, ataxia-telangiectasia or conditions associated with ataxia-telangiectasia are treated, prevented, diagnosed, and/or prognosing using the polypeptides or polynucleotides of the invention, and/or agonists or antagonists thereof.

[0694] Examples of congenital immunodeficiencies in which T cell and/or B cell function and/or number is decreased include, but are not limited to: DiGeorge anomaly, severe combined immunodeficiencies (SCID) (including, but not limited to, X-linked SCID, autosomal recessive SCID, adenosine deaminase deficiency, purine nucleoside phosphorylase (PNP) deficiency, Class II MHC deficiency (Bare lymphocyte syndrome), Wiskott-Aldrich syndrome, and ataxia telangiectasia), thymic hypoplasia, third and fourth pharyngeal pouch syndrome, 22q11.2 deletion, chronic mucocutaneous candidiasis, natural killer cell deficiency (NK), idiopathic CD4+ T-lymphocytopenia, immunodeficiency with predominant T cell defect (unspecified), and unspecified immunodeficiency of cell mediated immunity.

[0695] In specific embodiments, DiGeorge anomaly or conditions associated with DiGeorge anomaly are treated, prevented, diagnosed, and/or prognosed using polypeptides or polynucleotides of the invention, or antagonists or agonists thereof.

[0696] Other immunodeficiencies that may be treated, prevented, diagnosed, and/or prognosed using polypeptides or polynucleotides of the invention, and/or agonists or antagonists thereof, include, but are not limited to, chronic granulomatous disease, Chédiak-Higashi syndrome, myeloperoxidase deficiency, leukocyte glucose-6-phosphate dehydrogenase deficiency, X-linked lymphoproliferative syndrome (XLP), leukocyte adhesion deficiency, complement component deficiencies (including C1, C2, C3, C4, C5, C6, C7, C8 and/or C9 deficiencies), reticular dysgenesis, thymic alymphoplasia-aplasia, immunodeficiency with thymoma, severe congenital leukopenia, dysplasia with immunodeficiency, neonatal neutropenia, short limbed dwarfism, and Nezelof syndrome-combined immunodeficiency with Igs.

[0697] In a preferred embodiment, the immunodeficiencies and/or conditions associated with the immunodeficiencies recited above are treated, prevented, diagnosed and/or prognosed using polynucleotides, polypeptides, antibodies, and/or agonists or antagonists of the present invention.

[0698] In a preferred embodiment polynucleotides, polypeptides, antibodies, and/or agonists or antagonists of the present invention could be used as an agent to boost immunoresponsiveness among immunodeficient individuals. In specific embodiments, polynucleotides, polypeptides, antibodies, and/or agonists or antagonists of the present invention could be used as an agent to boost immunoresponsiveness among B cell and/or T cell immunodeficient individuals.

[0699] The polynucleotides, polypeptides, antibodies, and/or agonists or antagonists of the present invention may be useful in treating, preventing, diagnosing and/or prognosing autoimmune disorders. Many autoimmune disorders result from inappropriate recognition of self as foreign material by immune cells. This inappropriate recognition results in an immune response leading to the destruction of the host tissue. Therefore, the administration of polynucleotides and polypeptides of the invention that can inhibit an immune response, particularly the proliferation, differentiation, or chemotaxis of T-cells, may be an effective therapy in preventing autoimmune disorders.

[0700] Autoimmune diseases or disorders that may be treated, prevented, diagnosed and/or prognosed by polynucleotides, polypeptides, antibodies, and/or agonists or antagonists of the present invention include, but are not limited to, one or more of the following: systemic lupus erythematosus, rheumatoid arthritis, ankylosing spondylitis, multiple sclerosis, autoimmune thyroiditis, Hashimoto's thyroiditis, autoimmune hemolytic anemia, hemolytic anemia, thrombocytopenia, autoimmune thrombocytopenia purpura, autoimmune neonatal thrombocytopenia, idiopathic thrombocytopenia purpura, purpura (e.g., Henloch-Scoenlein purpura), autoimmunocytopenia, Goodpasture's syndrome, Pemphigus vulgaris, myasthenia gravis, Grave's disease (hyperthyroidism), and insulin-resistant diabetes mellitus.

[0701] Additional disorders that are likely to have an autoimmune component that may be treated, prevented, and/or diagnosed with the compositions of the invention include, but are not limited to, type II collagen-induced arthritis, antiphospholipid syndrome, dermatitis, allergic encephalomyelitis, myocarditis, relapsing polychondritis, rheumatic heart disease, neuritis, uveitis ophthalmia, polyendocrinopathies, Reiter's Disease, Stiff-Man Syndrome, autoimmune pulmonary inflammation, autism, Guillain-Barre Syndrome, insulin dependent diabetes mellitus, and autoimmune inflammatory eye disorders.

[0702] Additional disorders that are likely to have an autoimmune component that may be treated, prevented, diagnosed and/or prognosed with the compositions of the invention include, but are not limited to, scleroderma with anti-collagen antibodies (often characterized, e.g., by nucleolar and other nuclear antibodies), mixed connective tissue disease (often characterized, e.g., by antibodies to extractable nuclear antigens (e.g., ribonucleoprotein)), polymyositis (often characterized, e.g., by nonhistone ANA), pernicious anemia (often characterized, e.g., by antiparietal cell, microsomes, and intrinsic factor antibodies), idiopathic Addison's disease (often characterized, e.g., by humoral and cell-mediated adrenal cytotoxicity, infertility (often characterized, e.g., by antispermatozoal antibodies), glomerulonephritis (often characterized, e.g., by glomerular basement membrane antibodies or immune complexes), bullous pemphigoid (often characterized, e.g., by IgG and complement in basement membrane), Sjogren's syndrome (often characterized, e.g., by multiple tissue antibodies, and/or a specific nonhistone ANA (SS-B)), diabetes mellitus (often characterized, e.g., by cell-mediated and humoral islet cell antibodies), and adrenergic drug resistance (including adrenergic drug resistance with asthma or cystic fibrosis) (often characterized, e.g., by beta-adrenergic receptor antibodies).

[0703] Additional disorders that may have an autoimmune component that may be treated, prevented, diagnosed and/or prognosed with the compositions of the invention include, but are not limited to, chronic active hepatitis (often characterized, e.g., by smooth muscle antibodies), primary biliary cirrhosis (often characterized, e.g., by mitochondria antibodies), other endocrine gland failure (often characterized, e.g., by specific tissue antibodies in some cases), vitiligo (often characterized, e.g., by melanocyte antibodies), vasculitis (often characterized, e.g., by Ig and complement in vessel walls and/or low serum complement), post-MI (often characterized, e.g., by myocardial antibodies), cardiotomy syndrome (often characterized, e.g., by myocardial antibodies), urticaria (often characterized, e.g., by IgG and IgM antibodies to IgE), atopic dermatitis (often characterized, e.g., by IgG and IgM antibodies to IgE), asthma (often characterized, e.g., by IgG and IgM antibodies to IgE), and many other inflammatory, granulomatous, degenerative, and atrophic disorders.

[0704] In a preferred embodiment, the autoimmune diseases and disorders and/or conditions associated with the diseases and disorders recited above are treated, prevented, diagnosed and/or prognosed using for example, antagonists or agonists, polypeptides or polynucleotides, or antibodies of the present invention. In a specific preferred embodiment, rheumatoid arthritis is treated, prevented, and/or diagnosed using polynucleotides, polypeptides, antibodies, and/or agonists or antagonists of the present invention.

[0705] In another specific preferred embodiment, systemic lupus erythematosus is treated, prevented, and/or diagnosed using polynucleotides, polypeptides, antibodies, and/or agonists or antagonists of the present invention. In another specific preferred embodiment, idiopathic thrombocytopenia purpura is treated, prevented, and/or diagnosed using polynucleotides, polypeptides, antibodies, and/or agonists or antagonists of the present invention.

[0706] In another specific preferred embodiment IgA nephropathy is treated, prevented, and/or diagnosed using polynucleotides, polypeptides, antibodies, and/or agonists or antagonists of the present invention.

[0707] In a preferred embodiment, the autoimmune diseases and disorders and/or conditions associated with the diseases and disorders recited above are treated, prevented, diagnosed and/or prognosed using polynucleotides, polypeptides, antibodies, and/or agonists or antagonists of the present invention

[0708] In preferred embodiments, polypeptides, antibodies, polynucleotides and/or agonists or antagonists of the present invention are used as a immunosuppressive agent(s).

[0709] Polynucleotides, polypeptides, antibodies, and/or agonists or antagonists of the present invention may be useful in treating, preventing, prognosing, and/or diagnosing diseases, disorders, and/or conditions of hematopoietic cells. Polynucleotides, polypeptides, antibodies, and/or agonists or antagonists of the present invention could be used to increase differentiation and proliferation of hematopoietic cells, including the pluripotent stem cells, in an effort to treat or prevent those diseases, disorders, and/or conditions associated with a decrease in certain (or many) types hematopoietic cells, including but not limited to, leukopenia, neutropenia, anemia, and thrombocytopenia. Alternatively, Polynucleotides, polypeptides, antibodies, and/or agonists or antagonists of the present invention could be used to increase differentiation and proliferation of hematopoietic cells, including the pluripotent stem cells, in an effort to treat or prevent those diseases, disorders, and/or conditions associated with an increase in certain (or many) types of hematopoietic cells, including but not limited to, histiocytosis.

[0710] Allergic reactions and conditions, such as asthma (particularly allergic asthma) or other respiratory problems, may also be treated, prevented, diagnosed and/or prognosed using polypeptides, antibodies, or polynucleotides of the invention, and/or agonists or antagonists thereof. Moreover, these molecules can be used to treat, prevent, prognose, and/or diagnose anaphylaxis, hypersensitivity to an antigenic molecule, or blood group incompatibility.

[0711] Additionally, polypeptides or polynucleotides of the invention, and/or agonists or antagonists thereof, may be used to treat, prevent, diagnose and/or prognose IgE-mediated allergic reactions. Such allergic reactions include, but are not limited to, asthma, rhinitis, and eczema. In specific embodiments, polynucleotides, polypeptides, antibodies, and/or agonists or antagonists of the present invention may be used to modulate IgE concentrations in vitro or in vivo.

[0712] Moreover, polynucleotides, polypeptides, antibodies, and/or agonists or antagonists of the present invention have uses in the diagnosis, prognosis, prevention, and/or treatment of inflammatory conditions. For example, since polypeptides, antibodies, or polynucleotides of the invention, and/or agonists or antagonists of the invention may inhibit the activation, proliferation and/or differentiation of cells involved in an inflammatory response, these molecules can be used to prevent and/or treat chronic and acute inflammatory conditions. Such inflammatory conditions include, but are not limited to, for example, inflammation associated with infection (e.g., septic shock, sepsis, or systemic inflammatory response syndrome), ischemia-reperfusion injury, endotoxin lethality, complement-mediated hyperacute rejection, nephritis, cytokine or chemokine induced lung injury, inflammatory bowel disease, Crohn's disease, over production of cytokines (e.g., TNF or IL-1.), respiratory disorders (e.g., asthma and allergy); gastrointestinal disorders (e.g., inflammatory bowel disease); cancers (e.g., gastric, ovarian, lung, bladder, liver, and breast); CNS disorders (e.g., multiple sclerosis; ischemic brain injury and/or stroke, traumatic brain injury, neurodegenerative disorders (e.g., Parkinson's disease and Alzheimer's disease); AIDS-related dementia; and prion disease); cardiovascular disorders (e.g., atherosclerosis, myocarditis, cardiovascular disease, and cardiopulmonary bypass complications); as well as many additional diseases, conditions, and disorders that are characterized by inflammation (e.g., hepatitis, rheumatoid arthritis, gout, trauma, pancreatitis, sarcoidosis, dermatitis, renal ischemia-reperfusion injury, Grave's disease, systemic lupus erythematosus, diabetes mellitus, and allogenic transplant rejection).

[0713] Because inflammation is a fundamental defense mechanism, inflammatory disorders can effect virtually any tissue of the body. Accordingly, polynucleotides, polypeptides, and antibodies of the invention, as well as agonists or antagonists thereof, have uses in the treatment of tissue-specific inflammatory disorders, including, but not limited to, adrenalitis, alveolitis, angiocholecystitis, appendicitis, balanitis, blepharitis, bronchitis, bursitis, carditis, cellulitis, cervicitis, cholecystitis, chorditis, cochlitis, colitis, conjunctivitis, cystitis, dermatitis, diverticulitis, encephalitis, endocarditis, esophagitis, eustachitis, fibrositis, folliculitis, gastritis, gastroenteritis, gingivitis, glossitis, hepatosplenitis, keratitis, labyrinthitis, laryngitis, lymphangitis, mastitis, media otitis, meningitis, metritis, mucitis, myocarditis, myosititis, myringitis, nephritis, neuritis, orchitis, osteochondritis, otitis, pericarditis, peritendonitis, peritonitis, pharyngitis, phlebitis, poliomyelitis, prostatitis, pulpitis, retinitis, rhinitis, salpingitis, scleritis, sclerochoroiditis, scrotitis, sinusitis, spondylitis, steatitis, stomatitis, synovitis, syringitis, tendonitis, tonsillitis, urethritis, and vaginitis.

[0714] In specific embodiments, polypeptides, antibodies, or polynucleotides of the invention, and/or agonists or antagonists thereof, are useful to diagnose, prognose, prevent, and/or treat organ transplant rejections and graft-versus-host disease. Organ rejection occurs by host immune cell destruction of the transplanted tissue through an immune response. Similarly, an immune response is also involved in GVHD, but, in this case, the foreign transplanted immune cells destroy the host tissues. Polypeptides, antibodies, or polynucleotides of the invention, and/or agonists or antagonists thereof, that inhibit an immune response, particularly the activation, proliferation, differentiation, or chemotaxis of T-cells, may be an effective therapy in preventing organ rejection or GVHD. In specific embodiments, polypeptides, antibodies, or polynucleotides of the invention, and/or agonists or antagonists thereof, that inhibit an immune response, particularly the activation, proliferation, differentiation, or chemotaxis of T-cells, may be an effective therapy in preventing experimental allergic and hyperacute xenograft rejection.

[0715] In other embodiments, polypeptides, antibodies, or polynucleotides of the invention, and/or agonists or antagonists thereof, are useful to diagnose, prognose, prevent, and/or treat immune complex diseases, including, but not limited to, serum sickness, post streptococcal glomerulonephritis, polyarteritis nodosa, and immune complex-induced vasculitis.

[0716] Polypeptides, antibodies, polynucleotides and/or agonists or antagonists of the invention can be used to treat, detect, and/or prevent infectious agents. For example, by increasing the immune response, particularly increasing the proliferation activation and/or differentiation of B and/or T cells, infectious diseases may be treated, detected, and/or prevented. The immune response may be increased by either enhancing an existing immune response, or by initiating a new immune response. Alternatively, polynucleotides, polypeptides, antibodies, and/or agonists or antagonists of the present invention may also directly inhibit the infectious agent (refer to section of application listing infectious agents, etc), without necessarily eliciting an immune response.

[0717] In another embodiment, polypeptides, antibodies, polynucleotides and/or agonists or antagonists of the present invention are used as a vaccine adjuvant that enhances immune responsiveness to an antigen. In a specific embodiment, polypeptides, antibodies, polynucleotides and/or agonists or antagonists of the present invention are used as an adjuvant to enhance tumor-specific immune responses.

[0718] In another specific embodiment, polypeptides, antibodies, polynucleotides and/or agonists or antagonists of the present invention are used as an adjuvant to enhance anti-viral immune responses. Anti-viral immune responses that may be enhanced using the compositions of the invention as an adjuvant, include virus and virus associated diseases or symptoms described herein or otherwise known in the art. In specific embodiments, the compositions of the invention are used as an adjuvant to enhance an immune response to a virus, disease, or symptom selected from the group consisting of: AIDS, meningitis, Dengue, EBV, and hepatitis (e.g., hepatitis B). In another specific embodiment, the compositions of the invention are used as an adjuvant to enhance an immune response to a virus, disease, or symptom selected from the group consisting of: HIV/AIDS, respiratory syncytial virus, Dengue, rotavirus, Japanese B encephalitis, influenza A and B, parainfluenza, measles, cytomegalovirus, rabies, Junin, Chikungunya, Rift Valley Fever, herpes simplex, and yellow fever.

[0719] In another specific embodiment, polypeptides, antibodies, polynucleotides and/or agonists or antagonists of the present invention are used as an adjuvant to enhance anti-bacterial or anti-fungal immune responses. Anti-bacterial or anti-fungal immune responses that may be enhanced using the compositions of the invention as an adjuvant, include bacteria or fungus and bacteria or fungus associated diseases or symptoms described herein or otherwise known in the art. In specific embodiments, the compositions of the invention are used as an adjuvant to enhance an immune response to a bacteria or fungus, disease, or symptom selected from the group consisting of: tetanus, Diphtheria, botulism, and meningitis type B.

[0720] In another specific embodiment, the compositions of the invention are used as an adjuvant to enhance an immune response to a bacteria or fungus, disease, or symptom selected from the group consisting of: Vibrio cholerae, Mycobacterium leprae, Salmonella typhi, Salmonella paratyphi, Meisseria meningitidis, Streptococcus pneumoniae, Group B streptococcus, Shigella spp., Enterotoxigenic Escherichia coli, Enterohemorrhagic E. coli, and Borrelia burgdorferi.

[0721] In another specific embodiment, polypeptides, antibodies, polynucleotides and/or agonists or antagonists of the present invention are used as an adjuvant to enhance anti-parasitic immune responses. Anti-parasitic immune responses that may be enhanced using the compositions of the invention as an adjuvant, include parasite and parasite associated diseases or symptoms described herein or otherwise known in the art. In specific embodiments, the compositions of the invention are used as an adjuvant to enhance an immune response to a parasite. In another specific embodiment, the compositions of the invention are used as an adjuvant to enhance an immune response to Plasmodium (malaria) or Leishmania.

[0722] In another specific embodiment, polypeptides, antibodies, polynucleotides and/or agonists or antagonists of the present invention may also be employed to treat infectious diseases including silicosis, sarcoidosis, and idiopathic pulmonary fibrosis; for example, by preventing the recruitment and activation of mononuclear phagocytes.

[0723] In another specific embodiment, polypeptides, antibodies, polynucleotides and/or agonists or antagonists of the present invention are used as an antigen for the generation of antibodies to inhibit or enhance immune mediated responses against polypeptides of the invention.

[0724] In one embodiment, polypeptides, antibodies, polynucleotides and/or agonists or antagonists of the present invention are administered to an animal (e.g., mouse, rat, rabbit, hamster, guinea pig, pigs, micro-pig, chicken, camel, goat, horse, cow, sheep, dog, cat, non-human primate, and human, most preferably human) to boost the immune system to produce increased quantities of one or more antibodies (e.g., IgG, IgA, IgM, and IgE), to induce higher affinity antibody production and immunoglobulin class switching (e.g., IgG, IgA, IgM, and IgE), and/or to increase an immune response.

[0725] In another specific embodiment, polypeptides, antibodies, polynucleotides and/or agonists or antagonists of the present invention are used as a stimulator of B cell responsiveness to pathogens.

[0726] In another specific embodiment, polypeptides, antibodies, polynucleotides and/or agonists or antagonists of the present invention are used as an activator of T cells.

[0727] In another specific embodiment, polypeptides, antibodies, polynucleotides and/or agonists or antagonists of the present invention are used as an agent that elevates the immune status of an individual prior to their receipt of immunosuppressive therapies.

[0728] In another specific embodiment, polypeptides, antibodies, polynucleotides and/or agonists or antagonists of the present invention are used as an agent to induce higher affinity antibodies.

[0729] In another specific embodiment, polypeptides, antibodies, polynucleotides and/or agonists or antagonists of the present invention are used as an agent to increase serum immunoglobulin concentrations.

[0730] In another specific embodiment, polypeptides, antibodies, polynucleotides and/or agonists or antagonists of the present invention are used as an agent to accelerate recovery of immunocompromised individuals.

[0731] In another specific embodiment, polypeptides, antibodies, polynucleotides and/or agonists or antagonists of the present invention are used as an agent to boost immunoresponsiveness among aged populations and/or neonates.

[0732] In another specific embodiment, polypeptides, antibodies, polynucleotides and/or agonists or antagonists of the present invention are used as an immune system enhancer prior to, during, or after bone marrow transplant and/or other transplants (e.g., allogeneic or xenogeneic organ transplantation). With respect to transplantation, compositions of the invention may be administered prior to, concomitant with, and/or after transplantation. In a specific embodiment, compositions of the invention are administered after transplantation, prior to the beginning of recovery of T-cell populations. In another specific embodiment, compositions of the invention are first administered after transplantation after the beginning of recovery of T cell populations, but prior to full recovery of B cell populations.

[0733] In another specific embodiment, polypeptides, antibodies, polynucleotides and/or agonists or antagonists of the present invention are used as an agent to boost immunoresponsiveness among individuals having an acquired loss of B cell function. Conditions resulting in an acquired loss of B cell function that may be ameliorated or treated by administering the polypeptides, antibodies, polynucleotides and/or agonists or antagonists thereof, include, but are not limited to, HIV Infection, AIDS, bone marrow transplant, and B cell chronic lymphocytic leukemia (CLL).

[0734] In another specific embodiment, polypeptides, antibodies, polynucleotides and/or agonists or antagonists of the present invention are used as an agent to boost immunoresponsiveness among individuals having a temporary immune deficiency. Conditions resulting in a temporary immune deficiency that may be ameliorated or treated by administering the polypeptides, antibodies, polynucleotides and/or agonists or antagonists thereof, include, but are not limited to, recovery from viral infections (e.g., influenza), conditions associated with malnutrition, recovery from infectious mononucleosis, or conditions associated with stress, recovery from measles, recovery from blood transfusion, and recovery from surgery.

[0735] In another specific embodiment, polypeptides, antibodies, polynucleotides and/or agonists or antagonists of the present invention are used as a regulator of antigen presentation by monocytes, dendritic cells, and/or B-cells. In one embodiment, polynucleotides, polypeptides, antibodies, and/or agonists or antagonists of the present invention enhance antigen presentation or antagonizes antigen presentation in vitro or in vivo. Moreover, in related embodiments, said enhancement or antagonism of antigen presentation may be useful as an anti-tumor treatment or to modulate the immune system.

[0736] In another specific embodiment, polypeptides, antibodies, polynucleotides and/or agonists or antagonists of the present invention are used as an agent to direct an individual's immune system towards development of a humoral response (i.e. TH2) as opposed to a TH1 cellular response.

[0737] In another specific embodiment, polypeptides, antibodies, polynucleotides and/or agonists or antagonists of the present invention are used as a means to induce tumor proliferation and thus make it more susceptible to anti-neoplastic agents. For example, multiple myeloma is a slowly dividing disease and is thus refractory to virtually all anti-neoplastic regimens. If these cells were forced to proliferate more rapidly their susceptibility profile would likely change.

[0738] In another specific embodiment, polypeptides, antibodies, polynucleotides and/or agonists or antagonists of the present invention are used as a stimulator of B cell production in pathologies such as AIDS, chronic lymphocyte disorder and/or Common Variable Immunodificiency.

[0739] In another specific embodiment, polypeptides, antibodies, polynucleotides and/or agonists or antagonists of the present invention are used as a therapy for generation and/or regeneration of lymphoid tissues following surgery, trauma or genetic defect. In another specific embodiment, polypeptides, antibodies, polynucleotides and/or agonists or antagonists of the present invention are used in the pretreatment of bone marrow samples prior to transplant.

[0740] In another specific embodiment, polypeptides, antibodies, polynucleotides and/or agonists or antagonists of the present invention are used as a gene-based therapy for genetically inherited disorders resulting in immuno-incompetence/immunodeficiency such as observed among SCID patients.

[0741] In another specific embodiment, polypeptides, antibodies, polynucleotides and/or agonists or antagonists of the present invention are used as a means of activating monocytes/macrophages to defend against parasitic diseases that effect monocytes such as Leishmania.

[0742] In another specific embodiment, polypeptides, antibodies, polynucleotides and/or agonists or antagonists of the present invention are used as a means of regulating secreted cytokines that are elicited by polypeptides of the invention.

[0743] In another embodiment, polypeptides, antibodies, polynucleotides and/or agonists or antagonists of the present invention are used in one or more of the applications decribed herein, as they may apply to veterinary medicine.

[0744] In another specific embodiment, polypeptides, antibodies, polynucleotides and/or agonists or antagonists of the present invention are used as a means of blocking various aspects of immune responses to foreign agents or self. Examples of diseases or conditions in which blocking of certain aspects of immune responses may be desired include autoimmune disorders such as lupus, and arthritis, as well as immunoresponsiveness to skin allergies, inflammation, bowel disease, injury and diseases/disorders associated with pathogens.

[0745] In another specific embodiment, polypeptides, antibodies, polynucleotides and/or agonists or antagonists of the present invention are used as a therapy for preventing the B cell proliferation and Ig secretion associated with autoimmune diseases such as idiopathic thrombocytopenic purpura, systemic lupus erythematosus and multiple sclerosis.

[0746] In another specific embodiment, polypeptides, antibodies, polynucleotides and/or agonists or antagonists of the present invention are used as a inhibitor of B and/or T cell migration in endothelial cells. This activity disrupts tissue architecture or cognate responses and is useful, for example in disrupting immune responses, and blocking sepsis.

[0747] In another specific embodiment, polypeptides, antibodies, polynucleotides and/or agonists or antagonists of the present invention are used as a therapy for chronic hypergammaglobulinemia evident in such diseases as monoclonal gammopathy of undetermined significance (MGUS), Waldenstrom's disease, related idiopathic monoclonal gammopathies, and plasmacytomas.

[0748] In another specific embodiment, polypeptides, antibodies, polynucleotides and/or agonists or antagonists of the present invention may be employed for instance to inhibit polypeptide chemotaxis and activation of macrophages and their precursors, and of neutrophils, basophils, B lymphocytes and some T-cell subsets, e.g., activated and CD8 cytotoxic T cells and natural killer cells, in certain autoimmune and chronic inflammatory and infective diseases. Examples of autoimmune diseases are described herein and include multiple sclerosis, and insulin-dependent diabetes.

[0749] The polypeptides, antibodies, polynucleotides and/or agonists or antagonists of the present invention may also be employed to treat idiopathic hyper-eosinophilic syndrome by, for example, preventing eosinophil production and migration.

[0750] In another specific embodiment, polypeptides, antibodies, polynucleotides and/or agonists or antagonists of the present invention are used to enhance or inhibit complement mediated cell lysis.

[0751] In another specific embodiment, polypeptides, antibodies, polynucleotides and/or agonists or antagonists of the present invention are used to enhance or inhibit antibody dependent cellular cytotoxicity.

[0752] In another specific embodiment, polypeptides, antibodies, polynucleotides and/or agonists or antagonists of the present invention may also be employed for treating atherosclerosis, for example, by preventing monocyte infiltration in the artery wall.

[0753] In another specific embodiment, polypeptides, antibodies, polynucleotides and/or agonists or antagonists of the present invention may be employed to treat adult respiratory distress syndrome (ARDS).

[0754] In another specific embodiment, polypeptides, antibodies, polynucleotides and/or agonists or antagonists of the present invention may be useful for stimulating wound and tissue repair, stimulating angiogenesis, and/or stimulating the repair of vascular or lymphatic diseases or disorders. Additionally, agonists and antagonists of the invention may be used to stimulate the regeneration of mucosal surfaces.

[0755] In a specific embodiment, polynucleotides or polypeptides, and/or agonists thereof are used to diagnose, prognose, treat, and/or prevent a disorder characterized by primary or acquired immunodeficiency, deficient serum immunoglobulin production, recurrent infections, and/or immune system dysfunction. Moreover, polynucleotides or polypeptides, and/or agonists thereof may be used to treat or prevent infections of the joints, bones, skin, and/or parotid glands, blood-borne infections (e.g., sepsis, meningitis, septic arthritis, and/or osteomyelitis), autoimmune diseases (e.g., those disclosed herein), inflammatory disorders, and malignancies, and/or any disease or disorder or condition associated with these infections, diseases, disorders and/or malignancies) including, but not limited to, CVID, other primary immune deficiencies, HIV disease, CLL, recurrent bronchitis, sinusitis, otitis media, conjunctivitis, pneumonia, hepatitis, meningitis, herpes zoster (e.g., severe herpes zoster), and/or pneumocystis carnii. Other diseases and disorders that may be prevented, diagnosed, prognosed, and/or treated with polynucleotides or polypeptides, and/or agonists of the present invention include, but are not limited to, HIV infection, HTLV-BLV infection, lymphopenia, phagocyte bactericidal dysfunction anemia, thrombocytopenia, and hemoglobinuria.

[0756] In another embodiment, polynucleotides, polypeptides, antibodies, and/or agonists or antagonists of the present invention are used to treat, and/or diagnose an individual having common variable immunodeficiency disease (“CVID”; also known as “acquired agammaglobulinemia” and “acquired hypogammaglobulinemia”) or a subset of this disease.

[0757] In a specific embodiment, polynucleotides, polypeptides, antibodies, and/or agonists or antagonists of the present invention may be used to diagnose, prognose, prevent, and/or treat cancers or neoplasms including immune cell or immune tissue-related cancers or neoplasms. Examples of cancers or neoplasms that may be prevented, diagnosed, or treated by polynucleotides, polypeptides, antibodies, and/or agonists or antagonists of the present invention include, but are not limited to, acute myelogenous leukemia, chronic myelogenous leukemia, Hodgkin's disease, non-Hodgkin's lymphoma, acute lymphocytic anemia (ALL) Chronic lymphocyte leukemia, plasmacytomas, multiple myeloma, Burkitt's lymphoma, EBV-transformed diseases, and/or diseases and disorders described in the section entitled “Hyperproliferative Disorders” elsewhere herein.

[0758] In another specific embodiment, polypeptides, antibodies, polynucleotides and/or agonists or antagonists of the present invention are used as a therapy for decreasing cellular proliferation of Large B-cell Lymphomas.

[0759] In another specific embodiment, polypeptides, antibodies, polynucleotides and/or agonists or antagonists of the present invention are used as a means of decreasing the involvement of B cells and Ig associated with Chronic Myelogenous Leukemia.

[0760] In specific embodiments, the compositions of the invention are used as an agent to boost immunoresponsiveness among B cell immunodeficient individuals, such as, for example, an individual who has undergone a partial or complete splenectomy.

[0761] Antagonists of the invention include, for example, binding and/or inhibitory antibodies, antisense nucleic acids, ribozymes or soluble forms of the polypeptides of the present invention (e.g., Fc fusion protein; see, e.g., Example 9). Agonists of the invention include, for example, binding or stimulatory antibodies, and soluble forms of the polypeptides (e.g., Fc fusion proteins; see, e.g., Example 9). polypeptides, antibodies, polynucleotides and/or agonists or antagonists of the present invention may be employed in a composition with a pharmaceutically acceptable carrier, e.g., as described herein.

[0762] In another embodiment, polypeptides, antibodies, polynucleotides and/or agonists or antagonists of the present invention are administered to an animal (including, but not limited to, those listed above, and also including transgenic animals) incapable of producing functional endogenous antibody molecules or having an otherwise compromised endogenous immune system, but which is capable of producing human immunoglobulin molecules by means of a reconstituted or partially reconstituted immune system from another animal (see, e.g., published PCT Application Nos. WO98/24893, WO/9634096, WO/9633735, and WO/9110741). Administration of polypeptides, antibodies, polynucleotides and/or agonists or antagonists of the present invention to such animals is useful for the generation of monoclonal antibodies against the polypeptides, antibodies, polynucleotides and/or agonists or antagonists of the present invention.

Blood-Related Disorders

[0763] The polynucleotides, polypeptides, antibodies, and/or agonists or antagonists of the present invention may be used to modulate hemostatic (the stopping of bleeding) or thrombolytic (clot dissolving) activity. For example, by increasing hemostatic or thrombolytic activity, polynucleotides or polypeptides, and/or agonists or antagonists of the present invention could be used to treat or prevent blood coagulation diseases, disorders, and/or conditions (e.g., afibrinogenemia, factor deficiencies, hemophilia), blood platelet diseases, disorders, and/or conditions (e.g., thrombocytopenia), or wounds resulting from trauma, surgery, or other causes. Alternatively, polynucleotides, polypeptides, antibodies, and/or agonists or antagonists of the present invention that can decrease hemostatic or thrombolytic activity could be used to inhibit or dissolve clotting. These molecules could be important in the treatment or prevention of heart attacks (infarction), strokes, or scarring.

[0764] In specific embodiments, the polynucleotides, polypeptides, antibodies, and/or agonists or antagonists of the present invention may be used to prevent, diagnose, prognose, and/or treat thrombosis, arterial thrombosis, venous thrombosis, thromboembolism, pulmonary embolism, atherosclerosis, myocardial infarction, transient ischemic attack, unstable angina. In specific embodiments, the polynucleotides, polypeptides, antibodies, and/or agonists or antagonists of the present invention may be used for the prevention of occulsion of saphenous grafts, for reducing the risk of periprocedural thrombosis as might accompany angioplasty procedures, for reducing the risk of stroke in patients with atrial fibrillation including nonrheumatic atrial fibrillation, for reducing the risk of embolism associated with mechanical heart valves and or mitral valves disease. Other uses for the polynucleotides, polypeptides, antibodies, and/or agonists or antagonists of the present invention, include, but are not limited to, the prevention of occlusions in extrcorporeal devices (e.g., intravascular canulas, vascular access shunts in hemodialysis patients, hemodialysis machines, and cardiopulmonary bypass machines).

[0765] In another embodiment, a polypeptide of the invention, or polynucleotides, antibodies, agonists, or antagonists corresponding to that polypeptide, may be used to prevent, diagnose, prognose, and/or treat diseases and disorders of the blood and/or blood forming organs associated with the tissue(s) in which the polypeptide of the invention is expressed, including one, two, three, four, five, or more tissues disclosed in Table 1B, column 8 (Tissue Distribution Library Code).

[0766] The polynucleotides, polypeptides, antibodies, and/or agonists or antagonists of the present invention may be used to modulate hematopoietic activity (the formation of blood cells). For example, the polynucleotides, polypeptides, antibodies, and/or agonists or antagonists of the present invention may be used to increase the quantity of all or subsets of blood cells, such as, for example, erythrocytes, lymphocytes (B or T cells), myeloid cells (e.g., basophils, eosinophils, neutrophils, mast cells, macrophages) and platelets. The ability to decrease the quantity of blood cells or subsets of blood cells may be useful in the prevention, detection, diagnosis and/or treatment of anemias and leukopenias described below. Alternatively, the polynucleotides, polypeptides, antibodies, and/or agonists or antagonists of the present invention may be used to decrease the quantity of all or subsets of blood cells, such as, for example, erythrocytes, lymphocytes (B or T cells), myeloid cells (e.g., basophils, eosinophils, neutrophils, mast cells, macrophages) and platelets. The ability to decrease the quantity of blood cells or subsets of blood cells may be useful in the prevention, detection, diagnosis and/or treatment of leukocytoses, such as, for example eosinophilia.

[0767] The polynucleotides, polypeptides, antibodies, and/or agonists or antagonists of the present invention may be used to prevent, treat, or diagnose blood dyscrasia.

[0768] Anemias are conditions in which the number of red blood cells or amount of hemoglobin (the protein that carries oxygen) in them is below normal. Anemia may be caused by excessive bleeding, decreased red blood cell production, or increased red blood cell destruction (hemolysis). The polynucleotides, polypeptides, antibodies, and/or agonists or antagonists of the present invention may be useful in treating, preventing, and/or diagnosing anemias. Anemias that may be treated prevented or diagnosed by the polynucleotides, polypeptides, antibodies, and/or agonists or antagonists of the present invention include iron deficiency anemia, hypochromic anemia, microcytic anemia, chlorosis, hereditary siderob;astic anemia, idiopathic acquired sideroblastic anemia, red cell aplasia, megaloblastic anemia (e.g., pernicious anemia, (vitamin B12 deficiency) and folic acid deficiency anemia), aplastic anemia, hemolytic anemias (e.g., autoimmune helolytic anemia, microangiopathic hemolytic anemia, and paroxysmal nocturnal hemoglobinuria). The polynucleotides, polypeptides, antibodies, and/or agonists or antagonists of the present invention may be useful in treating, preventing, and/or diagnosing anemias associated with diseases including but not limited to, anemias associated with systemic lupus erythematosus, cancers, lymphomas, chronic renal disease, and enlarged spleens. The polynucleotides, polypeptides, antibodies, and/or agonists or antagonists of the present invention may be useful in treating, preventing, and/or diagnosing anemias arising from drug treatments such as anemias associated with methyldopa, dapsone, and/or sulfadrugs. Additionally, rhe polynucleotides, polypeptides, antibodies, and/or agonists or antagonists of the present invention may be useful in treating, preventing, and/or diagnosing anemias associated with abnormal red blood cell architecture including but not limited to, hereditary spherocytosis, hereditary elliptocytosis, glucose-6-phosphate dehydrogenase deficiency, and sickle cell anemia.

[0769] The polynucleotides, polypeptides, antibodies, and/or agonists or antagonists of the present invention may be useful in treating, preventing, and/or diagnosing hemoglobin abnormalities, (e.g., those associated with sickle cell anemia, hemoglobin C disease, hemoglobin S-C disease, and hemoglobin E disease). Additionally, the polynucleotides, polypeptides, antibodies, and/or agonists or antagonists of the present invention may be useful in diagnosing, prognosing, preventing, and/or treating thalassemias, including, but not limited to major and minor forms of alpha-thalassemia and beta-thalassemia.

[0770] In another embodiment, the polynucleotides, polypeptides, antibodies, and/or agonists or antagonists of the present invention may be useful in diagnosing, prognosing, preventing, and/or treating bleeding disorders including, but not limited to, thrombocytopenia (e.g., idiopathic thrombocytopenic purpura, and thrombotic thrombocytopenic purpura), Von Willebrand's disease, hereditary platelet disorders (e.g., storage pool disease such as Chediak-Higashi and Hermansky-Pudlak syndromes, thromboxane A2 dysfunction, thromboasthenia, and Bernard-Soulier syndrome), hemolytic-uremic syndrome, hemophelias such as hemophelia A or Factor VII deficiency and Christmas disease or Factor IX deficiency, Hereditary Hemorhhagic Telangiectsia, also known as Rendu-Osler-Weber syndrome, allergic purpura (Henoch Schonlein purpura) and disseminated intravascular coagulation.

[0771] The effect of the polynucleotides, polypeptides, antibodies, and/or agonists or antagonists of the present invention on the clotting time of blood may be monitored using any of the clotting tests known in the art including, but not limited to, whole blood partial thromboplastin time (PTT), the activated partial thromboplastin time (aPTT), the activated clotting time (ACT), the recalcified activated clotting time, or the Lee-White Clotting time. Several diseases and a variety of drugs can cause platelet dysfunction. Thus, in a specific embodiment, the polynucleotides, polypeptides, antibodies, and/or agonists or antagonists of the present invention may be useful in diagnosing, prognosing, preventing, and/or treating acquired platelet dysfunction such as platelet dysfunction accompanying kidney failure, leukemia, multiple myeloma, cirrhosis of the liver, and systemic lupus erythematosus as well as platelet dysfunction associated with drug treatments, including treatment with aspirin, ticlopidine, nonsteroidal anti-inflammatory drugs (used for arthritis, pain, and sprains), and penicillin in high doses.

[0772] In another embodiment, the polynucleotides, polypeptides, antibodies, and/or agonists or antagonists of the present invention may be useful in diagnosing, prognosing, preventing, and/or treating diseases and disorders characterized by or associated with increased or decreased numbers of white blood cells. Leukopenia occurs when the number of white blood cells decreases below normal. Leukopenias include, but are not limited to, neutropenia and lymphocytopenia. An increase in the number of white blood cells compared to normal is known as leukocytosis. The body generates increased numbers of white blood cells during infection. Thus, leukocytosis may simply be a normal physiological parameter that reflects infection. Alternatively, leukocytosis may be an indicator of injury or other disease such as cancer. Leokocytoses, include but are not limited to, eosinophilia, and accumulations of macrophages. In specific embodiments, the polynucleotides, polypeptides, antibodies, and/or agonists or antagonists of the present invention may be useful in diagnosing, prognosing, preventing, and/or treating leukopenia. In other specific embodiments, the polynucleotides, polypeptides, antibodies, and/or agonists or antagonists of the present invention may be useful in diagnosing, prognosing, preventing, and/or treating leukocytosis.

[0773] Leukopenia may be a generalized decreased in all types of white blood cells, or may be a specific depletion of particular types of white blood cells. Thus, in specific embodiments, the polynucleotides, polypeptides, antibodies, and/or agonists or antagonists of the present invention may be useful in diagnosing, prognosing, preventing, and/or treating decreases in neutrophil numbers, known as neutropenia. Neutropenias that may be diagnosed, prognosed, prevented, and/or treated by the polynucleotides, polypeptides, antibodies, and/or agonists or antagonists of the present invention include, but are not limited to, infantile genetic agranulocytosis, familial neutropenia, cyclic neutropenia, neutropenias resulting from or associated with dietary deficiencies (e.g., vitamin B 12 deficiency or folic acid deficiency), neutropenias resulting from or associated with drug treatments (e.g., antibiotic regimens such as penicillin treatment, sulfonamide treatment, anticoagulant treatment, anticonvulsant drugs, anti-thyroid drugs, and cancer chemotherapy), and neutropenias resulting from increased neutrophil destruction that may occur in association with some bacterial or viral infections, allergic disorders, autoimmune diseases, conditions in which an individual has an enlarged spleen (e.g., Felty syndrome, malaria and sarcoidosis), and some drug treatment regimens.

[0774] The polynucleotides, polypeptides, antibodies, and/or agonists or antagonists of the present invention may be useful in diagnosing, prognosing, preventing, and/or treating lymphocytopenias (decreased numbers of B and/or T lymphocytes), including, but not limited lymphocytopenias resulting from or associated with stress, drug treatments (e.g., drug treatment with corticosteroids, cancer chemotherapies, and/or radiation therapies), AIDS infection and/or other diseases such as, for example, cancer, rheumatoid arthritis, systemic lupus erythematosus, chronic infections, some viral infections and/or hereditary disorders (e.g., DiGeorge syndrome, Wiskott-Aldrich Syndome, severe combined immunodeficiency, ataxia telangiectsia).

[0775] The polynucleotides, polypeptides, antibodies, and/or agonists or antagonists of the present invention may be useful in diagnosing, prognosing, preventing, and/or treating diseases and disorders associated with macrophage numbers and/or macrophage function including, but not limited to, Gaucher's disease, Niemann-Pick disease, Letterer-Siwe disease and Hand-Schuller-Christian disease.

[0776] In another embodiment, the polynucleotides, polypeptides, antibodies, and/or agonists or antagonists of the present invention may be useful in diagnosing, prognosing, preventing, and/or treating diseases and disorders associated with eosinophil numbers and/or eosinophil function including, but not limited to, idiopathic hypereosinophilic syndrome, eosinophilia-myalgia syndrome, and Hand-Schuller-Christian disease.

[0777] In yet another embodiment, the polynucleotides, polypeptides, antibodies, and/or agonists or antagonists of the present invention may be useful in diagnosing, prognosing, preventing, and/or treating leukemias and lymphomas including, but not limited to, acute lymphocytic (lymphpblastic) leukemia (ALL), acute myeloid (myelocytic, myelogenous, myeloblastic, or myelomonocytic) leukemia, chronic lymphocytic leukemia (e.g., B cell leukemias, T cell leukemias, Sezary syndrome, and Hairy cell leukenia), chronic myelocytic (myeloid, myelogenous, or granulocytic) leukemia, Hodgkin's lymphoma, non-hodgkin's lymphoma, Burkitt's lymphoma, and mycosis fungoides.

[0778] In other embodiments, the polynucleotides, polypeptides, antibodies, and/or agonists or antagonists of the present invention may be useful in diagnosing, prognosing, preventing, and/or treating diseases and disorders of plasma cells including, but not limited to, plasma cell dyscrasias, monoclonal gammaopathies, monoclonal gammopathies of undetermined significance, multiple myeloma, macroglobulinemia, Waldenstrom's macroglobulinemia, cryoglobulinemia, and Raynaud's phenomenon.

[0779] In other embodiments, the polynucleotides, polypeptides, antibodies, and/or agonists or antagonists of the present invention may be useful in treating, preventing, and/or diagnosing myeloproliferative disorders, including but not limited to, polycythemia vera, relative polycythemia, secondary polycythemia, myelofibrosis, acute myelofibrosis, agnogenic myelod metaplasia, thrombocythemia, (including both primary and seconday thrombocythemia) and chronic myelocytic leukemia.

[0780] In other embodiments, the polynucleotides, polypeptides, antibodies, and/or agonists or antagonists of the present invention may be useful as a treatment prior to surgery, to increase blood cell production.

[0781] In other embodiments, the polynucleotides, polypeptides, antibodies, and/or agonists or antagonists of the present invention may be useful as an agent to enhance the migration, phagocytosis, superoxide production, antibody dependent cellular cytotoxicity of neutrophils, eosionophils and macrophages.

[0782] In other embodiments, the polynucleotides, polypeptides, antibodies, and/or agonists or antagonists of the present invention may be useful as an agent to increase the number of stem cells in circulation prior to stem cells pheresis. In another specific embodiment, the polynucleotides, polypeptides, antibodies, and/or agonists or antagonists of the present invention may be useful as an agent to increase the number of stem cells in circulation prior to platelet pheresis.

[0783] In other embodiments, the polynucleotides, polypeptides, antibodies, and/or agonists or antagonists of the present invention may be useful as an agent to increase cytokine production.

[0784] In other embodiments, the polynucleotides, polypeptides, antibodies, and/or agonists or antagonists of the present invention may be useful in preventing, diagnosing, and/or treating primary hematopoietic disorders.

Hyperproliferative Disorders

[0785] In certain embodiments, polynucleotides or polypeptides, or agonists or antagonists of the present invention can be used to treat or detect hyperproliferative disorders, including neoplasms. Polynucleotides or polypeptides, or agonists or antagonists of the present invention may inhibit the proliferation of the disorder through direct or indirect interactions. Alternatively, Polynucleotides or polypeptides, or agonists or antagonists of the present invention may proliferate other cells which can inhibit the hyperproliferative disorder.

[0786] For example, by increasing an immune response, particularly increasing antigenic qualities of the hyperproliferative disorder or by proliferating, differentiating, or mobilizing T-cells, hyperproliferative disorders can be treated. This immune response may be increased by either enhancing an existing immune response, or by initiating a new immune response. Alternatively, decreasing an immune response may also be a method of treating hyperproliferative disorders, such as a chemotherapeutic agent.

[0787] Examples of hyperproliferative disorders that can be treated or detected by polynucleotides or polypeptides, or agonists or antagonists of the present invention include, but are not limited to neoplasms located in the: colon, abdomen, bone, breast, digestive system, liver, pancreas, peritoneum, endocrine glands (adrenal, parathyroid, pituitary, testicles, ovary, thymus, thyroid), eye, head and neck, nervous (central and peripheral), lymphatic system, pelvis, skin, soft tissue, spleen, thorax, and urogenital tract.

[0788] Similarly, other hyperproliferative disorders can also be treated or detected by polynucleotides or polypeptides, or agonists or antagonists of the present invention. Examples of such hyperproliferative disorders include, but are not limited to: Acute Childhood Lymphoblastic Leukemia, Acute Lymphoblastic Leukemia, Acute Lymphocytic Leukemia, Acute Myeloid Leukemia, Adrenocortical Carcinoma, Adult (Primary) Hepatocellular Cancer, Adult (Primary) Liver Cancer, Adult Acute Lymphocytic Leukemia, Adult Acute Myeloid Leukemia, Adult Hodgkin's Disease, Adult Hodgkin's Lymphoma, Adult Lymphocytic Leukemia, Adult Non-Hodgkin's Lymphoma, Adult Primary Liver Cancer, Adult Soft Tissue Sarcoma, AIDS-Related Lymphoma, AIDS-Related Malignancies, Anal Cancer, Astrocytoma, Bile Duct Cancer, Bladder Cancer, Bone Cancer, Brain Stem Glioma, Brain Tumors, Breast Cancer, Cancer of the Renal Pelvis and Ureter, Central Nervous System (Primary) Lymphoma, Central Nervous System Lymphoma, Cerebellar Astrocytoma, Cerebral Astrocytoma, Cervical Cancer, Childhood (Primary) Hepatocellular Cancer, Childhood (Primary) Liver Cancer, Childhood Acute Lymphoblastic Leukemia, Childhood Acute Myeloid Leukemia, Childhood Brain Stem Glioma, Childhood Cerebellar Astrocytoma, Childhood Cerebral Astrocytoma, Childhood Extracranial Germ Cell Tumors, Childhood Hodgkin's Disease, Childhood Hodgkin's Lymphoma, Childhood Hypothalamic and Visual Pathway Glioma, Childhood Lymphoblastic Leukemia, Childhood Medulloblastoma, Childhood Non-Hodgkin's Lymphoma, Childhood Pineal and Supratentorial Primitive Neuroectodermal Tumors, Childhood Primary Liver Cancer, Childhood Rhabdomyosarcoma, Childhood Soft Tissue Sarcoma, Childhood Visual Pathway and Hypothalamic Glioma, Chronic Lymphocytic Leukemia, Chronic Myelogenous Leukemia, Colon Cancer, Cutaneous T-Cell Lymphoma, Endocrine Pancreas Islet Cell Carcinoma, Endometrial Cancer, Ependymoma, Epithelial Cancer, Esophageal Cancer, Ewing's Sarcoma and Related Tumors, Exocrine Pancreatic Cancer, Extracranial Germ Cell Tumor, Extragonadal Germ Cell Tumor, Extrahepatic Bile Duct Cancer, Eye Cancer, Female Breast Cancer, Gaucher's Disease, Gallbladder Cancer, Gastric Cancer, Gastrointestinal Carcinoid Tumor, Gastrointestinal Tumors, Germ Cell Tumors, Gestational Trophoblastic Tumor, Hairy Cell Leukemia, Head and Neck Cancer, Hepatocellular Cancer, Hodgkin's Disease, Hodgkin's Lymphoma, Hypergammaglobulinemia, Hypopharyngeal Cancer, Intestinal Cancers, Intraocular Melanoma, Islet Cell Carcinoma, Islet Cell Pancreatic Cancer, Kaposi's Sarcoma, Kidney Cancer, Laryngeal Cancer, Lip and Oral Cavity Cancer, Liver Cancer, Lung Cancer, Lymphoproliferative Disorders, Macroglobulinemia, Male Breast Cancer, Malignant Mesothelioma, Malignant Thymoma, Medulloblastoma, Melanoma, Mesothelioma, Metastatic Occult Primary Squamous Neck Cancer, Metastatic Primary Squamous Neck Cancer, Metastatic Squamous Neck Cancer, Multiple Myeloma, Multiple Myeloma/Plasma Cell Neoplasm, Myelodysplastic Syndrome, Myelogenous Leukemia, Myeloid Leukemia, Myeloproliferative Disorders, Nasal Cavity and Paranasal Sinus Cancer, Nasopharyngeal Cancer, Neuroblastoma, Non-Hodgkin's Lymphoma During Pregnancy, Nonmelanoma Skin Cancer, Non-Small Cell Lung Cancer, Occult Primary Metastatic Squamous Neck Cancer, Oropharyngeal Cancer, Osteo-/Malignant Fibrous Sarcoma, Osteosarcoma/Malignant Fibrous Histiocytoma, Osteosarcoma/Malignant Fibrous Histiocytoma of Bone, Ovarian Epithelial Cancer, Ovarian Germ Cell Tumor, Ovarian Low Malignant Potential Tumor, Pancreatic Cancer, Paraproteinemias, Purpura, Parathyroid Cancer, Penile Cancer, Pheochromocytoma, Pituitary Tumor, Plasma Cell Neoplasm/Multiple Myeloma, Primary Central Nervous System Lymphoma, Primary Liver Cancer, Prostate Cancer, Rectal Cancer, Renal Cell Cancer, Renal Pelvis and Ureter Cancer, Retinoblastoma, Rhabdomyosarcoma, Salivary Gland Cancer, Sarcoidosis Sarcomas, Sezary Syndrome, Skin Cancer, Small Cell Lung Cancer, Small Intestine Cancer, Soft Tissue Sarcoma, Squamous Neck Cancer, Stomach Cancer, Supratentorial Primitive Neuroectodermal and Pineal Tumors, T-Cell Lymphoma, Testicular Cancer, Thymoma, Thyroid Cancer, Transitional Cell Cancer of the Renal Pelvis and Ureter, Transitional Renal Pelvis and Ureter Cancer, Trophoblastic Tumors, Ureter and Renal Pelvis Cell Cancer, Urethral Cancer, Uterine Cancer, Uterine Sarcoma, Vaginal Cancer, Visual Pathway and Hypothalamic Glioma, Vulvar Cancer, Waldenstrom's Macroglobulinemia, Wilms' Tumor, and any other hyperproliferative disease, besides neoplasia, located in an organ system listed above.

[0789] In another preferred embodiment, polynucleotides or polypeptides, or agonists or antagonists of the present invention are used to diagnose, prognose, prevent, and/or treat premalignant conditions and to prevent progression to a neoplastic or malignant state, including but not limited to those disorders described above. Such uses are indicated in conditions known or suspected of preceding progression to neoplasia or cancer, in particular, where non-neoplastic cell growth consisting of hyperplasia, metaplasia, or most particularly, dysplasia has occurred (for review of such abnormal growth conditions, see Robbins and Angell, 1976, Basic Pathology, 2d Ed., W. B. Saunders Co., Philadelphia, pp. 68-79.)

[0790] Hyperplasia is a form of controlled cell proliferation, involving an increase in cell number in a tissue or organ, without significant alteration in structure or function. Hyperplastic disorders which can be diagnosed, prognosed, prevented, and/or treated with compositions of the invention (including polynucleotides, polypeptides, agonists or antagonists) include, but are not limited to, angiofollicular mediastinal lymph node hyperplasia, angiolymphoid hyperplasia with eosinophilia, atypical melanocytic hyperplasia, basal cell hyperplasia, benign giant lymph node hyperplasia, cementum hyperplasia, congenital adrenal hyperplasia, congenital sebaceous hyperplasia, cystic hyperplasia, cystic hyperplasia of the breast, denture hyperplasia, ductal hyperplasia, endometrial hyperplasia, fibromuscular hyperplasia, focal epithelial hyperplasia, gingival hyperplasia, inflammatory fibrous hyperplasia, inflammatory papillary hyperplasia, intravascular papillary endothelial hyperplasia, nodular hyperplasia of prostate, nodular regenerative hyperplasia, pseudoepitheliomatous hyperplasia, senile sebaceous hyperplasia, and verrucous hyperplasia.

[0791] Metaplasia is a form of controlled cell growth in which one type of adult or fully differentiated cell substitutes for another type of adult cell. Metaplastic disorders which can be diagnosed, prognosed, prevented, and/or treated with compositions of the invention (including polynucleotides, polypeptides, agonists or antagonists) include, but are not limited to, agnogenic myeloid metaplasia, apocrine metaplasia, atypical metaplasia, autoparenchymatous metaplasia, connective tissue metaplasia, epithelial metaplasia, intestinal metaplasia, metaplastic anemia, metaplastic ossification, metaplastic polyps, myeloid metaplasia, primary myeloid metaplasia, secondary myeloid metaplasia, squamous metaplasia, squamous metaplasia of amnion, and symptomatic myeloid metaplasia.

[0792] Dysplasia is frequently a forerunner of cancer, and is found mainly in the epithelia; it is the most disorderly form of non-neoplastic cell growth, involving a loss in individual cell uniformity and in the architectural orientation of cells. Dysplastic cells often have abnormally large, deeply stained nuclei, and exhibit pleomorphism. Dysplasia characteristically occurs where there exists chronic irritation or inflammation. Dysplastic disorders which can be diagnosed, prognosed, prevented, and/or treated with compositions of the invention (including polynucleotides, polypeptides, agonists or antagonists) include, but are not limited to, anhidrotic ectodermal dysplasia, anterofacial dysplasia, asphyxiating thoracic dysplasia, atriodigital dysplasia, bronchopulmonary dysplasia, cerebral dysplasia, cervical dysplasia, chondroectodermal dysplasia, cleidocranial dysplasia, congenital ectodermal dysplasia, craniodiaphysial dysplasia, craniocarpotarsal dysplasia, craniometaphysial dysplasia, dentin dysplasia, diaphysial dysplasia, ectodermal dysplasia, enamel dysplasia, encephalo-ophthalmic dysplasia, dysplasia epiphysialis hemimelia, dysplasia epiphysialis multiplex, dysplasia epiphysialis punctata, epithelial dysplasia, faciodigitogenital dysplasia, familial fibrous dysplasia of jaws, familial white folded dysplasia, fibromuscular dysplasia, fibrous dysplasia of bone, florid osseous dysplasia, hereditary renal-retinal dysplasia, hidrotic ectodermal dysplasia, hypohidrotic ectodermal dysplasia, lymphopenic thymic dysplasia, mammary dysplasia, mandibulofacial dysplasia, metaphysial dysplasia, Mondini dysplasia, monostotic fibrous dysplasia, mucoepithelial dysplasia, multiple epiphysial dysplasia, oculoauriculovertebral dysplasia, oculodentodigital dysplasia, oculovertebral dysplasia, odontogenic dysplasia, ophthalmomandibulomelic dysplasia, periapical cemental dysplasia, polyostotic fibrous dysplasia, pseudoachondroplastic spondyloepiphysial dysplasia, retinal dysplasia, septo-optic dysplasia, spondyloepiphysial dysplasia, and ventriculoradial dysplasia.

[0793] Additional pre-neoplastic disorders which can be diagnosed, prognosed, prevented, and/or treated with compositions of the invention (including polynucleotides, polypeptides, agonists or antagonists) include, but are not limited to, benign dysproliferative disorders (e.g., benign tumors, fibrocystic conditions, tissue hypertrophy, intestinal polyps, colon polyps, and esophageal dysplasia), leukoplakia, keratoses, Bowen's disease, Farmer's Skin, solar cheilitis, and solar keratosis.

[0794] In another embodiment, a polypeptide of the invention, or polynucleotides, antibodies, agonists, or antagonists corresponding to that polypeptide, may be used to diagnose and/or prognose disorders associated with the tissue(s) in which the polypeptide of the invention is expressed, including one, two, three, four, five, or more tissues disclosed in Table 1B, column 8 (Tissue Distribution Library Code).

[0795] In another embodiment, polynucleotides, polypeptides, antibodies, and/or agonists or antagonists of the present invention conjugated to a toxin or a radioactive isotope, as described herein, may be used to treat cancers and neoplasms, including, but not limited to those described herein. In a further preferred embodiment, polynucleotides, polypeptides, antibodies, and/or agonists or antagonists of the present invention conjugated to a toxin or a radioactive isotope, as described herein, may be used to treat acute myelogenous leukemia.

[0796] Additionally, polynucleotides, polypeptides, and/or agonists or antagonists of the invention may affect apoptosis, and therefore, would be useful in treating a number of diseases associated with increased cell survival or the inhibition of apoptosis. For example, diseases associated with increased cell survival or the inhibition of apoptosis that could be diagnosed, prognosed, prevented, and/or treated by polynucleotides, polypeptides, and/or agonists or antagonists of the invention, include cancers (such as follicular lymphomas, carcinomas with p53 mutations, and hormone-dependent tumors, including, but not limited to colon cancer, cardiac tumors, pancreatic cancer, melanoma, retinoblastoma, glioblastoma, lung cancer, intestinal cancer, testicular cancer, stomach cancer, neuroblastoma, myxoma, myoma, lymphoma, endothelioma, osteoblastoma, osteoclastoma, osteosarcoma, chondrosarcoma, adenoma, breast cancer, prostate cancer, Kaposi's sarcoma and ovarian cancer); autoimmune disorders such as, multiple sclerosis, Sjogren's syndrome, Hashimoto's thyroiditis, biliary cirrhosis, Behcet's disease, Crohn's disease, polymyositis, systemic lupus erythematosus and immune-related glomerulonephritis and rheumatoid arthritis) and viral infections (such as herpes viruses, pox viruses and adenoviruses), inflammation, graft v. host disease, acute graft rejection, and chronic graft rejection.

[0797] In preferred embodiments, polynucleotides, polypeptides, and/or agonists or antagonists of the invention are used to inhibit growth, progression, and/or metastasis of cancers, in particular those listed above.

[0798] Additional diseases or conditions associated with increased cell survival that could be diagnosed, prognosed, prevented, and/or treated by polynucleotides, polypeptides, and/or agonists or antagonists of the invention, include, but are not limited to, progression, and/or metastases of malignancies and related disorders such as leukemia (including acute leukemias (e.g., acute lymphocytic leukemia, acute myelocytic leukemia (including myeloblastic, promyelocytic, myelomonocytic, monocytic, and erythroleukemia)) and chronic leukemias (e.g., chronic myelocytic (granulocytic) leukemia and chronic lymphocytic leukemia)), polycythemia vera, lymphomas (e.g., Hodgkin's disease and non-Hodgkin's disease), multiple myeloma, Waldenstrom's macroglobulinemia, heavy chain disease, and solid tumors including, but not limited to, sarcomas and carcinomas such as fibrosarcoma, myxosarcoma, liposarcoma, chondrosarcoma, osteogenic sarcoma, chordoma, angiosarcoma, endotheliosarcoma, lymphangiosarcoma, lymphangioendotheliosarcoma, synovioma, mesothelioma, Ewing's tumor, leiomyosarcoma, rhabdomyosarcoma, colon carcinoma, pancreatic cancer, breast cancer, ovarian cancer, prostate cancer, squamous cell carcinoma, basal cell carcinoma, adenocarcinoma, sweat gland carcinoma, sebaceous gland carcinoma, papillary carcinoma, papillary adenocarcinomas, cystadenocarcinoma, medullary carcinoma, bronchogenic carcinoma, renal cell carcinoma, hepatoma, bile duct carcinoma, choriocarcinoma, seminoma, embryonal carcinoma, Wilm's tumor, cervical cancer, testicular tumor, lung carcinoma, small cell lung carcinoma, bladder carcinoma, epithelial carcinoma, glioma, astrocytoma, medulloblastoma, craniopharyngioma, ependymoma, pinealoma, emangioblastoma, acoustic neuroma, oligodendroglioma, menangioma, melanoma, neuroblastoma, and retinoblastoma.

[0799] Diseases associated with increased apoptosis that could be diagnosed, prognosed, prevented, and/or treated by polynucleotides, polypeptides, and/or agonists or antagonists of the invention, include AIDS; neurodegenerative disorders (such as Alzheimer's disease, Parkinson's disease, amyotrophic lateral sclerosis, retinitis pigmentosa, cerebellar degeneration and brain tumor or prior associated disease); autoimmune disorders (such as, multiple sclerosis, Sjogren's syndrome, Hashimoto's thyroiditis, biliary cirrhosis, Behcet's disease, Crohn's disease, polymyositis, systemic lupus erythematosus and immune-related glomerulonephritis and rheumatoid arthritis) myelodysplastic syndromes (such as aplastic anemia), graft v. host disease, ischemic injury (such as that caused by myocardial infarction, stroke and reperfusion injury), liver injury (e.g., hepatitis related liver injury, ischemia/reperfusion injury, cholestosis (bile duct injury) and liver cancer); toxin-induced liver disease (such as that caused by alcohol), septic shock, cachexia and anorexia.

[0800] Hyperproliferative diseases and/or disorders that could be diagnosed, prognosed, prevented, and/or treated by polynucleotides, polypeptides, and/or agonists or antagonists of the invention, include, but are not limited to, neoplasms located in the liver, abdomen, bone, breast, digestive system, pancreas, peritoneum, endocrine glands (adrenal, parathyroid, pituitary, testicles, ovary, thymus, thyroid), eye, head and neck, nervous system (central and peripheral), lymphatic system, pelvis, skin, soft tissue, spleen, thorax, and urogenital tract.

[0801] Similarly, other hyperproliferative disorders can also be diagnosed, prognosed, prevented, and/or treated by polynucleotides, polypeptides, and/or agonists or antagonists of the invention. Examples of such hyperproliferative disorders include, but are not limited to: hypergammaglobulinemia, lymphoproliferative disorders, paraproteinemias, purpura, sarcoidosis, Sezary Syndrome, Waldenstron's macroglobulinemia, Gaucher's Disease, histiocytosis, and any other hyperproliferative disease, besides neoplasia, located in an organ system listed above.

[0802] Another preferred embodiment utilizes polynucleotides of the present invention to inhibit aberrant cellular division, by gene therapy using the present invention, and/or protein fusions or fragments thereof.

[0803] Thus, the present invention provides a method for treating cell proliferative disorders by inserting into an abnormally proliferating cell a polynucleotide of the present invention, wherein said polynucleotide represses said expression.

[0804] Another embodiment of the present invention provides a method of treating cell-proliferative disorders in individuals comprising administration of one or more active gene copies of the present invention to an abnormally proliferating cell or cells. In a preferred embodiment, polynucleotides of the present invention is a DNA construct comprising a recombinant expression vector effective in expressing a DNA sequence encoding said polynucleotides. In another preferred embodiment of the present invention, the DNA construct encoding the poynucleotides of the present invention is inserted into cells to be treated utilizing a retrovirus, or more preferably an adenoviral vector (See G J. Nabel, et al., PNAS 1999 96: 324-326, which is hereby incorporated by reference). In a most preferred embodiment, the viral vector is defective and will not transform non-proliferating cells, only proliferating cells. Moreover, in a preferred embodiment, the polynucleotides of the present invention inserted into proliferating cells either alone, or in combination with or fused to other polynucleotides, can then be modulated via an external stimulus (i.e. magnetic, specific small molecule, chemical, or drug administration, etc.), which acts upon the promoter upstream of said polynucleotides to induce expression of the encoded protein product. As such the beneficial therapeutic affect of the present invention may be expressly modulated (i.e. to increase, decrease, or inhibit expression of the present invention) based upon said external stimulus.

[0805] Polynucleotides of the present invention may be useful in repressing expression of oncogenic genes or antigens. By “repressing expression of the oncogenic genes” is intended the suppression of the transcription of the gene, the degradation of the gene transcript (pre-message RNA), the inhibition of splicing, the destruction of the messenger RNA, the prevention of the post-translational modifications of the protein, the destruction of the protein, or the inhibition of the normal function of the protein.

[0806] For local administration to abnormally proliferating cells, polynucleotides of the present invention may be administered by any method known to those of skill in the art including, but not limited to transfection, electroporation, microinjection of cells, or in vehicles such as liposomes, lipofectin, or as naked polynucleotides, or any other method described throughout the specification. The polynucleotide of the present invention may be delivered by known gene delivery systems such as, but not limited to, retroviral vectors (Gilboa, J. Virology 44:845 (1982); Hocke, Nature 320:275 (1986); Wilson, et al., Proc. Natl. Acad. Sci. U.S.A. 85:3014), vaccinia virus system (Chakrabarty et al., Mol. Cell Biol. 5:3403 (1985) or other efficient DNA delivery systems (Yates et al., Nature 313:812 (1985)) known to those skilled in the art. These references are exemplary only and are hereby incorporated by reference. In order to specifically deliver or transfect cells which are abnormally proliferating and spare non-dividing cells, it is preferable to utilize a retrovirus, or adenoviral (as described in the art and elsewhere herein) delivery system known to those of skill in the art. Since host DNA replication is required for retroviral DNA to integrate and the retrovirus will be unable to self replicate due to the lack of the retrovirus genes needed for its life cycle. Utilizing such a retroviral delivery system for polynucleotides of the present invention will target said gene and constructs to abnormally proliferating cells and will spare the non-dividing normal cells.

[0807] The polynucleotides of the present invention may be delivered directly to cell proliferative disorder/disease sites in internal organs, body cavities and the like by use of imaging devices used to guide an injecting needle directly to the disease site. The polynucleotides of the present invention may also be administered to disease sites at the time of surgical intervention.

[0808] By “cell proliferative disease” is meant any human or animal disease or disorder, affecting any one or any combination of organs, cavities, or body parts, which is characterized by single or multiple local abnormal proliferations of cells, groups of cells, or tissues, whether benign or malignant.

[0809] Any amount of the polynucleotides of the present invention may be administered as long as it has a biologically inhibiting effect on the proliferation of the treated cells. Moreover, it is possible to administer more than one of the polynucleotide of the present invention simultaneously to the same site. By “biologically inhibiting” is meant partial or total growth inhibition as well as decreases in the rate of proliferation or growth of the cells. The biologically inhibitory dose may be determined by assessing the effects of the polynucleotides of the present invention on target malignant or abnormally proliferating cell growth in tissue culture, tumor growth in animals and cell cultures, or any other method known to one of ordinary skill in the art.

[0810] The present invention is further directed to antibody-based therapies which involve administering of anti-polypeptides and anti-polynucleotide antibodies to a mammalian, preferably human, patient for treating one or more of the described disorders. Methods for producing anti-polypeptides and anti-polynucleotide antibodies polyclonal and monoclonal antibodies are described in detail elsewhere herein. Such antibodies may be provided in pharmaceutically acceptable compositions as known in the art or as described herein.

[0811] A summary of the ways in which the antibodies of the present invention may be used therapeutically includes binding polynucleotides or polypeptides of the present invention locally or systemically in the body or by direct cytotoxicity of the antibody, e.g. as mediated by complement (CDC) or by effector cells (ADCC). Some of these approaches are described in more detail below. Armed with the teachings provided herein, one of ordinary skill in the art will know how to use the antibodies of the present invention for diagnostic, monitoring or therapeutic purposes without undue experimentation.

[0812] In particular, the antibodies, fragments and derivatives of the present invention are useful for treating a subject having or developing cell proliferative and/or differentiation disorders as described herein. Such treatment comprises administering a single or multiple doses of the antibody, or a fragment, derivative, or a conjugate thereof.

[0813] The antibodies of this invention may be advantageously utilized in combination with other monoclonal or chimeric antibodies, or with lymphokines or hematopoietic growth factors, for example., which serve to increase the number or activity of effector cells which interact with the antibodies.

[0814] It is preferred to use high affinity and/or potent in vivo inhibiting and/or neutralizing antibodies against polypeptides or polynucleotides of the present invention, fragments or regions thereof, for both immunoassays directed to and therapy of disorders related to polynucleotides or polypeptides, including fragements thereof, of the present invention. Such antibodies, fragments, or regions, will preferably have an affinity for polynucleotides or polypeptides, including fragements thereof. Preferred binding affinities include those with a dissociation constant or Kd less than 5×10⁻⁶M, 10⁻⁶M, 5×10⁻⁷M, 10⁻⁷M, 5×10⁻⁸M, 10⁻⁸M, 5×10⁻⁹M, 10⁻⁹M, 5×10⁻¹⁰M, 10⁻¹⁰M, 5×10⁻¹¹M, 10⁻¹¹M, 10×10⁻¹²M, 10⁻¹²M, 5×10⁻¹³M, 10⁻¹³M, 5×10¹⁴M, 10⁻¹⁴M, 5×10⁻¹⁵M, and 10⁻¹⁵M.

[0815] Moreover, polypeptides of the present invention are useful in inhibiting the angiogenesis of proliferative cells or tissues, either alone, as a protein fusion, or in combination with other polypeptides directly or indirectly, as described elsewhere herein. In a most preferred embodiment, said anti-angiogenesis effect may be achieved indirectly, for example, through the inhibition of hematopoietic, tumor-specific cells, such as tumor-associated macrophages (See Joseph I B, et al. J Natl Cancer Inst, 90(21):1648-53 (1998), which is hereby incorporated by reference). Antibodies directed to polypeptides or polynucleotides of the present invention may also result in inhibition of angiogenesis directly, or indirectly (See Witte L, et al., Cancer Metastasis Rev. 17(2):155-61 (1998), which is hereby incorporated by reference)).

[0816] Polypeptides, including protein fusions, of the present invention, or fragments thereof may be useful in inhibiting proliferative cells or tissues through the induction of apoptosis. Said polypeptides may act either directly, or indirectly to induce apoptosis of proliferative cells and tissues, for example in the activation of a death-domain receptor, such as tumor necrosis factor (TNF) receptor-1, CD95 (Fas/APO-1), TNF-receptor-related apoptosis-mediated protein (TRAMP) and TNF-related apoptosis-inducing ligand (TRAIL) receptor-1 and -2 (See Schulze-Osthoff K, et.al., Eur J Biochem 254(3):439-59 (1998), which is hereby incorporated by reference). Moreover, in another preferred embodiment of the present invention, said polypeptides may induce apoptosis through other mechanisms, such as in the activation of other proteins which will activate apoptosis, or through stimulating the expression of said proteins, either alone or in combination with small molecule drugs or adjuviants, such as apoptonin, galectins, thioredoxins, anti-inflammatory proteins (See for example, Mutat Res 400(1-2):447-55 (1998), Med Hypotheses.50(5):423-33 (1998), Chem Biol Interact. April 24;111-112:23-34 (1998), J Mol Med.76(6):402-12 (1998), Int J Tissue React;20(1):3-15 (1998), which are all hereby incorporated by reference).

[0817] Polypeptides, including protein fusions to, or fragments thereof, of the present invention are useful in inhibiting the metastasis of proliferative cells or tissues. Inhibition may occur as a direct result of administering polypeptides, or antibodies directed to said polypeptides as described elsewere herein, or indirectly, such as activating the expression of proteins known to inhibit metastasis, for example alpha 4 integrins, (See, e.g., Curr Top Microbiol Immunol 1998;231:125-41, which is hereby incorporated by reference). Such thereapeutic affects of the present invention may be achieved either alone, or in combination with small molecule drugs or adjuvants.

[0818] In another embodiment, the invention provides a method of delivering compositions containing the polypeptides of the invention (e.g., compositions containing polypeptides or polypeptide antibodes associated with heterologous polypeptides, heterologous nucleic acids, toxins, or prodrugs) to targeted cells expressing the polypeptide of the present invention. Polypeptides or polypeptide antibodes of the invention may be associated with with heterologous polypeptides, heterologous nucleic acids, toxins, or prodrugs via hydrophobic, hydrophilic, ionic and/or covalent interactions.

[0819] Polypeptides, protein fusions to, or fragments thereof, of the present invention are useful in enhancing the immunogenicity and/or antigenicity of proliferating cells or tissues, either directly, such as would occur if the polypeptides of the present invention ‘vaccinated’ the immune response to respond to proliferative antigens and immunogens, or indirectly, such as in activating the expression of proteins known to enhance the immune response (e.g. chemokines), to said antigens and immunogens.

Renal Disorders

[0820] Polynucleotides, polypeptides, antibodies, and/or agonists or antagonists of the present invention, may be used to treat, prevent, diagnose, and/or prognose disorders of the renal system. Renal disorders which can be diagnosed, prognosed, prevented, and/or treated with compositions of the invention include, but are not limited to, kidney failure, nephritis, blood vessel disorders of kidney, metabolic and congenital kidney disorders, urinary disorders of the kidney, autoimmune disorders, sclerosis and necrosis, electrolyte imbalance, and kidney cancers.

[0821] Kidney diseases which can be diagnosed, prognosed, prevented, and/or treated with compositions of the invention include, but are not limited to, acute kidney failure, chronic kidney failure, atheroembolic renal failure, end-stage renal disease, inflammatory diseases of the kidney (e.g., acute glomerulonephritis, postinfectious glomerulonephritis, rapidly progressive glomerulonephritis, nephrotic syndrome, membranous glomerulonephritis, familial nephrotic syndrome, membranoproliferative glomerulonephritis I and II, mesangial proliferative glomerulonephritis, chronic glomerulonephritis, acute tubulointerstitial nephritis, chronic tubulointerstitial nephritis, acute post-streptococcal glomerulonephritis (PSGN), pyelonephritis, lupus nephritis, chronic nephritis, interstitial nephritis, and post-streptococcal glomerulonephritis), blood vessel disorders of the kidneys (e.g., kidney infarction, atheroembolic kidney disease, cortical necrosis, malignant nephrosclerosis, renal vein thrombosis, renal underperfusion, renal retinopathy, renal ischemia-reperfusion, renal artery embolism, and renal artery stenosis), and kidney disorders resulting form urinary tract disease (e.g., pyelonephritis, hydronephrosis, urolithiasis (renal lithiasis, nephrolithiasis), reflux nephropathy, urinary tract infections, urinary retention, and acute or chronic unilateral obstructive uropathy.)

[0822] In addition, compositions of the invention can be used to diagnose, prognose, prevent, and/or treat metabolic and congenital disorders of the kidney (e.g., uremia, renal amyloidosis, renal osteodystrophy, renal tubular acidosis, renal glycosuria, nephrogenic diabetes insipidus, cystinuria, Fanconi's syndrome, renal fibrocystic osteosis (renal rickets), Hartnup disease, Bartter's syndrome, Liddle's syndrome, polycystic kidney disease, medullary cystic disease, medullary sponge kidney, Alport's syndrome, nail-patella syndrome, congenital nephrotic syndrome, CRUSH syndrome, horseshoe kidney, diabetic nephropathy, nephrogenic diabetes insipidus, analgesic nephropathy, kidney stones, and membranous nephropathy), and autoimmune disorders of the kidney (e.g., systemic lupus erythematosus (SLE), Goodpasture syndrome, IgA nephropathy, and IgM mesangial proliferative glomerulonephritis).

[0823] Compositions of the invention can also be used to diagnose, prognose, prevent, and/or treat sclerotic or necrotic disorders of the kidney (e.g., glomerulosclerosis, diabetic nephropathy, focal segmental glomerulosclerosis (FSGS), necrotizing glomerulonephritis, and renal papillary necrosis), cancers of the kidney (e.g., nephroma, hypernephroma, nephroblastoma, renal cell cancer, transitional cell cancer, renal adenocarcinoma, squamous cell cancer, and Wilm's tumor), and electrolyte imbalances (e.g., nephrocalcinosis, pyuria, edema, hydronephritis, proteinuria, hyponatremia, hypematremia, hypokalemia, hyperkalemia, hypocalcemia, hypercalcemia, hypophosphatemia, and hyperphosphatemia).

[0824] Polypeptides may be administered using any method known in the art, including, but not limited to, direct needle injection at the delivery site, intravenous injection, topical administration, catheter infusion, biolistic injectors, particle accelerators, gelfoam sponge depots, other commercially available depot materials, osmotic pumps, oral or suppositorial solid pharmaceutical formulations, decanting or topical applications during surgery, aerosol delivery. Such methods are known in the art. Polypeptides may be administered as part of a Therapeutic, described in more detail below. Methods of delivering polynucleotides are described in more detail herein.

Cardiovascular Disorders

[0825] Polynucleotides or polypeptides, or agonists or antagonists of the present invention, may be used to treat, prevent, diagnose, and/or prognose cardiovascular disorders, including, but not limited to, peripheral artery disease, such as limb ischemia.

[0826] Cardiovascular disorders include, but are not limited to, cardiovascular abnormalities, such as arterio-arterial fistula, arteriovenous fistula, cerebral arteriovenous malformations, congenital heart defects, pulmonary atresia, and Scimitar Syndrome. Congenital heart defects include, but are not limited to, aortic coarctation, cor triatriatum, coronary vessel anomalies, crisscross heart, dextrocardia, patent ductus arteriosus, Ebstein's anomaly, Eisenmenger complex, hypoplastic left heart syndrome, levocardia, tetralogy of fallot, transposition of great vessels, double outlet right ventricle, tricuspid atresia, persistent truncus arteriosus, and heart septal defects, such as aortopulmonary septal defect, endocardial cushion defects, Lutembacher's Syndrome, trilogy of Fallot, ventricular heart septal defects.

[0827] Cardiovascular disorders also include, but are not limited to, heart disease, such as arrhythmias, carcinoid heart disease, high cardiac output, low cardiac output, cardiac tamponade, endocarditis (including bacterial), heart aneurysm, cardiac arrest, congestive heart failure, congestive cardiomyopathy, paroxysmal dyspnea, cardiac edema, heart hypertrophy, congestive cardiomyopathy, left ventricular hypertrophy, right ventricular hypertrophy, post-infarction heart rupture, ventricular septal rupture, heart valve diseases, myocardial diseases, myocardial ischemia, pericardial effusion, pericarditis (including constrictive and tuberculous), pneumopericardium, postpericardiotomy syndrome, pulmonary heart disease, rheumatic heart disease, ventricular dysfunction, hyperemia, cardiovascular pregnancy complications, Scimitar Syndrome, cardiovascular syphilis, and cardiovascular tuberculosis.

[0828] Arrhythmias include, but are not limited to, sinus arrhythmia, atrial fibrillation, atrial flutter, bradycardia, extrasystole, Adams-Stokes Syndrome, bundle-branch block, sinoatrial block, long QT syndrome, parasystole, Lown-Ganong-Levine Syndrome, Mahaim-type pre-excitation syndrome, Wolff-Parkinson-White syndrome, sick sinus syndrome, tachycardias, and ventricular fibrillation. Tachycardias include paroxysmal tachycardia, supraventricular tachycardia, accelerated idioventricular rhythm, atrioventricular nodal reentry tachycardia, ectopic atrial tachycardia, ectopic junctional tachycardia, sinoatrial nodal reentry tachycardia, sinus tachycardia, Torsades de Pointes, and ventricular tachycardia.

[0829] Heart valve diseases include, but are not limited to, aortic valve insufficiency, aortic valve stenosis, hear murmurs, aortic valve prolapse, mitral valve prolapse, tricuspid valve prolapse, mitral valve insufficiency, mitral valve stenosis, pulmonary atresia, pulmonary valve insufficiency, pulmonary valve stenosis, tricuspid atresia, tricuspid valve insufficiency, and tricuspid valve stenosis.

[0830] Myocardial diseases include, but are not limited to, alcoholic cardiomyopathy, congestive cardiomyopathy, hypertrophic cardiomyopathy, aortic subvalvular stenosis, pulmonary subvalvular stenosis, restrictive cardiomyopathy, Chagas cardiomyopathy, endocardial fibroelastosis, endomyocardial fibrosis, Kearns Syndrome, myocardial reperfusion injury, and myocarditis.

[0831] Myocardial ischemias include, but are not limited to, coronary disease, such as angina pectoris, coronary aneurysm, coronary arteriosclerosis, coronary thrombosis, coronary vasospasm, myocardial infarction and myocardial stunning.

[0832] Cardiovascular diseases also include vascular diseases such as aneurysms, angiodysplasia, angiomatosis, bacillary angiomatosis, Hippel-Lindau Disease, Klippel-Trenaunay-Weber Syndrome, Sturge-Weber Syndrome, angioneurotic edema, aortic diseases, Takayasu's Arteritis, aortitis, Leriche's Syndrome, arterial occlusive diseases, arteritis, enarteritis, polyarteritis nodosa, cerebrovascular disorders, diabetic angiopathies, diabetic retinopathy, embolisms, thrombosis, erythromelalgia, hemorrhoids, hepatic veno-occlusive disease, hypertension, hypotension, ischemia, peripheral vascular diseases, phlebitis, pulmonary veno-occlusive disease, Raynaud's disease, CREST syndrome, retinal vein occlusion, Scimitar syndrome, superior vena cava syndrome, telangiectasia, atacia telangiectasia, hereditary hemorrhagic telangiectasia, varicocele, varicose veins, varicose ulcer, vasculitis, and venous insufficiency.

[0833] Aneurysms include, but are not limited to, dissecting aneurysms, false aneurysms, infected aneurysms, ruptured aneurysms, aortic aneurysms, cerebral aneurysms, coronary aneurysms, heart aneurysms, and iliac aneurysms.

[0834] Arterial occlusive diseases include, but are not limited to, arteriosclerosis, intermittent claudication, carotid stenosis, fibromuscular dysplasias, mesenteric vascular occlusion, Moyamoya disease, renal artery obstruction, retinal artery occlusion, and thromboangiitis obliterans.

[0835] Cerebrovascular disorders include, but are not limited to, carotid artery diseases, cerebral amyloid angiopathy, cerebral aneurysm, cerebral anoxia, cerebral arteriosclerosis, cerebral arteriovenous malformation, cerebral artery diseases, cerebral embolism and thrombosis, carotid artery thrombosis, sinus thrombosis, Wallenberg's syndrome, cerebral hemorrhage, epidural hematoma, subdural hematoma, subaraxhnoid hemorrhage, cerebral infarction, cerebral ischemia (including transient), subclavian steal syndrome, periventricular leukomalacia, vascular headache, cluster headache, migraine, and vertebrobasilar insufficiency.

[0836] Embolisms include, but are not limited to, air embolisms, amniotic fluid embolisms, cholesterol embolisms, blue toe syndrome, fat embolisms, pulmonary embolisms, and thromoboembolisms. Thrombosis include, but are not limited to, coronary thrombosis, hepatic vein thrombosis, retinal vein occlusion, carotid artery thrombosis, sinus thrombosis, Wallenberg's syndrome, and thrombophlebitis.

[0837] Ischemic disorders include, but are not limited to, cerebral ischemia, ischemic colitis, compartment syndromes, anterior compartment syndrome, myocardial ischemia, reperfusion injuries, and peripheral limb ischemia. Vasculitis includes, but is not limited to, aortitis, arteritis, Behcet's Syndrome, Churg-Strauss Syndrome, mucocutaneous lymph node syndrome, thromboangiitis obliterans, hypersensitivity vasculitis, Schoenlein-Henoch purpura, allergic cutaneous vasculitis, and Wegener's granulomatosis.

[0838] Polypeptides may be administered using any method known in the art, including, but not limited to, direct needle injection at the delivery site, intravenous injection, topical administration, catheter infusion, biolistic injectors, particle accelerators, gelfoam sponge depots, other commercially available depot materials, osmotic pumps, oral or suppositorial solid pharmaceutical formulations, decanting or topical applications during surgery, aerosol delivery. Such methods are known in the art. Polypeptides may be administered as part of a Therapeutic, described in more detail below. Methods of delivering polynucleotides are described in more detail herein.

Respiratory Disorders

[0839] Polynucleotides or polypeptides, or agonists or antagonists of the present invention may be used to treat, prevent, diagnose, and/or prognose diseases and/or disorders of the respiratory system.

[0840] Diseases and disorders of the respiratory system include, but are not limited to, nasal vestibulitis, nonallergic rhinitis (e.g., acute rhinitis, chronic rhinitis, atrophic rhinitis, vasomotor rhinitis), nasal polyps, and sinusitis, juvenile angiofibromas, cancer of the nose and juvenile papillomas, vocal cord polyps, nodules (singer's nodules), contact ulcers, vocal cord paralysis, laryngoceles, pharyngitis (e.g., viral and bacterial), tonsillitis, tonsillar cellulitis, parapharyngeal abscess, laryngitis, laryngoceles, and throat cancers (e.g., cancer of the nasopharynx, tonsil cancer, larynx cancer), lung cancer (e.g., squamous cell carcinoma, small cell (oat cell) carcinoma, large cell carcinoma, and adenocarcinoma), allergic disorders (eosinophilic pneumonia, hypersensitivity pneumonitis (e.g., extrinsic allergic alveolitis, allergic interstitial pneumonitis, organic dust pneumoconiosis, allergic bronchopulmonary aspergillosis, asthma, Wegener's granulomatosis (granulomatous vasculitis), Goodpasture's syndrome)), pneumonia (e.g., bacterial pneumonia (e.g., Streptococcus pneumoniae (pneumoncoccal pneumonia), Staphylococcus aureus (staphylococcal pneumonia), Gram-negative bacterial pneumonia (caused by, e.g., Klebsiella and Pseudomas spp.), Mycoplasma pneumoniae pneumonia, Hemophilus influenzae pneumonia, Legionella pneumophila (Legionnaires' disease), and Chlamydia-psittaci (Psittacosis)), and viral pneumonia (e.g., influenza, chickenpox (varicella).

[0841] Additional diseases and disorders of the respiratory system include, but are not limited to bronchiolitis, polio (poliomyelitis), croup, respiratory syncytial viral infection, mumps, erythema infectiosum (fifth disease), roseola infantum, progressive rubella panencephalitis, german measles, and subacute sclerosing panencephalitis), fungal pneumonia (e.g., Histoplasmosis, Coccidioidomycosis, Blastomycosis, fungal infections in people with severely suppressed immune systems (e.g., cryptococcosis, caused by Cryptococcus neoformans; aspergillosis, caused by Aspergillus spp.; candidiasis, caused by Candida; and mucormycosis)), Pneumocystis carinii (pneumocystis pneumonia), atypical pneumonias (e.g., Mycoplasma and Chlamydia spp.), opportunistic infection pneumonia, nosocomial pneumonia, chemical pneumonitis, and aspiration pneumonia, pleural disorders (e.g., pleurisy, pleural effusion, and pneumothorax (e.g., simple spontaneous pneumothorax, complicated spontaneous pneumothorax, tension pneumothorax)), obstructive airway diseases (e.g., asthma, chronic obstructive pulmonary disease (COPD), emphysema, chronic or acute bronchitis), occupational lung diseases (e.g., silicosis, black lung (coal workers' pneumoconiosis), asbestosis, berylliosis, occupational asthsma, byssinosis, and benign pneumoconioses), Infiltrative Lung Disease (e.g., pulmonary fibrosis (e.g., fibrosing alveolitis, usual interstitial pneumonia), idiopathic pulmonary fibrosis, desquamative interstitial pneumonia, lymphoid interstitial pneumonia, histiocytosis X (e.g., Letterer-Siwe disease, Hand-Schüller-Christian disease, eosinophilic granuloma), idiopathic pulmonary hemosiderosis, sarcoidosis and pulmonary alveolar proteinosis), Acute respiratory distress syndrome (also called, e.g., adult respiratory distress syndrome), edema, pulmonary embolism, bronchitis (e.g., viral, bacterial), bronchiectasis, atelectasis, lung abscess (caused by, e.g., Staphylococcus aureus or Legionella pneumophila), and cystic fibrosis.

Anti-Angiogenesis Activity

[0842] The naturally occurring balance between endogenous stimulators and inhibitors of angiogenesis is one in which inhibitory influences predominate. Rastinejad et al., Cell 56:345-355 (1989). In those rare instances in which neovascularization occurs under normal physiological conditions, such as wound healing, organ regeneration, embryonic development, and female reproductive processes, angiogenesis is stringently regulated and spatially and temporally delimited. Under conditions of pathological angiogenesis such as that characterizing solid tumor growth, these regulatory controls fail. Unregulated angiogenesis becomes pathologic and sustains progression of many neoplastic and non-neoplastic diseases. A number of serious diseases are dominated by abnormal neovascularization including solid tumor growth and metastases, arthritis, some types of eye disorders, and psoriasis. See, e.g., reviews by Moses et al., Biotech. 9:630-634 (1991); Folkman et al., N. Engl. J. Med., 333:1757-1763 (1995); Auerbach et al., J. Microvasc. Res. 29:401-411 (1985); Folkman, Advances in Cancer Research, eds. Klein and Weinhouse, Academic Press, New York, pp. 175-203 (1985); Patz, Am. J. Opthalmol. 94:715-743 (1982); and Folkman et al., Science 221:719-725 (1983). In a number of pathological conditions, the process of angiogenesis contributes to the disease state. For example, significant data have accumulated which suggest that the growth of solid tumors is dependent on angiogenesis. Folkman and Klagsbrun, Science 235:442-447 (1987).

[0843] The present invention provides for treatment of diseases or disorders associated with neovascularization by administration of the polynucleotides and/or polypeptides of the invention, as well as agonists or antagonists of the present invention. Malignant and metastatic conditions which can be treated with the polynucleotides and polypeptides, or agonists or antagonists of the invention include, but are not limited to, malignancies, solid tumors, and cancers described herein and otherwise known in the art (for a review of such disorders, see Fishman et al., Medicine, 2d Ed., J. B. Lippincott Co., Philadelphia (1985)).Thus, the present invention provides a method of treating an angiogenesis-related disease and/or disorder, comprising administering to an individual in need thereof a therapeutically effective amount of a polynucleotide, polypeptide, antagonist and/or agonist of the invention. For example, polynucleotides, polypeptides, antagonists and/or agonists may be utilized in a variety of additional methods in order to therapeutically treat a cancer or tumor. Cancers which may be treated with polynucleotides, polypeptides, antagonists and/or agonists include, but are not limited to solid tumors, including prostate, lung, breast, ovarian, stomach, pancreas, larynx, esophagus, testes, liver, parotid, biliary tract, colon, rectum, cervix, uterus, endometrium, kidney, bladder, thyroid cancer; primary tumors and metastases; melanomas; glioblastoma; Kaposi's sarcoma; leiomyosarcoma; non-small cell lung cancer; colorectal cancer; advanced malignancies; and blood born tumors such as leukemias. For example, polynucleotides, polypeptides, antagonists and/or agonists may be delivered topically, in order to treat cancers such as skin cancer, head and neck tumors, breast tumors, and Kaposi's sarcoma.

[0844] Within yet other aspects, polynucleotides, polypeptides, antagonists and/or agonists may be utilized to treat superficial forms of bladder cancer by, for example, intravesical administration. Polynucleotides, polypeptides, antagonists and/or agonists may be delivered directly into the tumor, or near the tumor site, via injection or a catheter. Of course, as the artisan of ordinary skill will appreciate, the appropriate mode of administration will vary according to the cancer to be treated. Other modes of delivery are discussed herein.

[0845] Polynucleotides, polypeptides, antagonists and/or agonists may be useful in treating other disorders, besides cancers, which involve angiogenesis. These disorders include, but are not limited to: benign tumors, for example hemangiomas, acoustic neuromas, neurofibromas, trachomas, and pyogenic granulomas; artheroscleric plaques; ocular angiogenic diseases, for example, diabetic retinopathy, retinopathy of prematurity, macular degeneration, corneal graft rejection, neovascular glaucoma, retrolental fibroplasia, rubeosis, retinoblastoma, uvietis and Pterygia (abnormal blood vessel growth) of the eye; rheumatoid arthritis; psoriasis; delayed wound healing; endometriosis; vasculogenesis; granulations; hypertrophic scars (keloids); nonunion fractures; scleroderma; trachoma; vascular adhesions; myocardial angiogenesis; coronary collaterals; cerebral collaterals; arteriovenous malformations; ischemic limb angiogenesis; Osler-Webber Syndrome; plaque neovascularization; telangiectasia; hemophiliac joints; angiofibroma; fibromuscular dysplasia; wound granulation; Crohn's disease; and atherosclerosis.

[0846] For example, within one aspect of the present invention methods are provided for treating hypertrophic scars and keloids, comprising the step of administering a polynucleotide, polypeptide, antagonist and/or agonist of the invention to a hypertrophic scar or keloid.

[0847] Within one embodiment of the present invention polynucleotides, polypeptides, antagonists and/or agonists of the invention are directly injected into a hypertrophic scar or keloid, in order to prevent the progression of these lesions. This therapy is of particular value in the prophylactic treatment of conditions which are known to result in the development of hypertrophic scars and keloids (e.g., burns), and is preferably initiated after the proliferative phase has had time to progress (approximately 14 days after the initial injury), but before hypertrophic scar or keloid development. As noted above, the present invention also provides methods for treating neovascular diseases of the eye, including for example, corneal neovascularization, neovascular glaucoma, proliferative diabetic retinopathy, retrolental fibroplasia and macular degeneration.

[0848] Moreover, Ocular disorders associated with neovascularization which can be treated with the polynucleotides and polypeptides of the present invention (including agonists and/or antagonists) include, but are not limited to: neovascular glaucoma, diabetic retinopathy, retinoblastoma, retrolental fibroplasia, uveitis, retinopathy of prematurity macular degeneration, corneal graft neovascularization, as well as other eye inflammatory diseases, ocular tumors and diseases associated with choroidal or iris neovascularization. See, e.g., reviews by Waltman et al., Am. J. Ophthal. 85:704-710 (1978) and Gartner et al., Surv. Ophthal. 22:291-312 (1978).

[0849] Thus, within one aspect of the present invention methods are provided for treating neovascular diseases of the eye such as corneal neovascularization (including corneal graft neovascularization), comprising the step of administering to a patient a therapeutically effective amount of a compound (as described above) to the cornea, such that the formation of blood vessels is inhibited. Briefly, the cornea is a tissue which normally lacks blood vessels. In certain pathological conditions however, capillaries may extend into the cornea from the pericorneal vascular plexus of the limbus. When the cornea becomes vascularized, it also becomes clouded, resulting in a decline in the patient's visual acuity. Visual loss may become complete if the cornea completely opacitates. A wide variety of disorders can result in corneal neovascularization, including for example, corneal infections (e.g., trachoma, herpes simplex keratitis, leishmaniasis and onchocerciasis), immunological processes (e.g., graft rejection and Stevens-Johnson's syndrome), alkali burns, trauma, inflammation (of any cause), toxic and nutritional deficiency states, and as a complication of wearing contact lenses.

[0850] Within particularly preferred embodiments of the invention, may be prepared for topical administration in saline (combined with any of the preservatives and antimicrobial agents commonly used in ocular preparations), and administered in eyedrop form. The solution or suspension may be prepared in its pure form and administered several times daily. Alternatively, anti-angiogenic compositions, prepared as described above, may also be administered directly to the cornea. Within preferred embodiments, the anti-angiogenic composition is prepared with a muco-adhesive polymer which binds to cornea. Within further embodiments, the anti-angiogenic factors or anti-angiogenic compositions may be utilized as an adjunct to conventional steroid therapy. Topical therapy may also be useful prophylactically in corneal lesions which are known to have a high probability of inducing an angiogenic response (such as chemical burns). In these instances the treatment, likely in combination with steroids, may be instituted immediately to help prevent subsequent complications.

[0851] Within other embodiments, the compounds described above may be injected directly into the corneal stroma by an ophthalmologist under microscopic guidance. The preferred site of injection may vary with the morphology of the individual lesion, but the goal of the administration would be to place the composition at the advancing front of the vasculature (i.e., interspersed between the blood vessels and the normal cornea). In most cases this would involve perilimbic corneal injection to “protect” the cornea from the advancing blood vessels. This method may also be utilized shortly after a corneal insult in order to prophylactically prevent corneal neovascularization. In this situation the material could be injected in the perilimbic cornea interspersed between the corneal lesion and its undesired potential limbic blood supply. Such methods may also be utilized in a similar fashion to prevent capillary invasion of transplanted corneas. In a sustained-release form injections might only be required 2-3 times per year. A steroid could also be added to the injection solution to reduce inflammation resulting from the injection itself.

[0852] Within another aspect of the present invention, methods are provided for treating neovascular glaucoma, comprising the step of administering to a patient a therapeutically effective amount of a polynucleotide, polypeptide, antagonist and/or agonist to the eye, such that the formation of blood vessels is inhibited. In one embodiment, the compound may be administered topically to the eye in order to treat early forms of neovascular glaucoma. Within other embodiments, the compound may be implanted by injection into the region of the anterior chamber angle. Within other embodiments, the compound may also be placed in any location such that the compound is continuously released into the aqueous humor. Within another aspect of the present invention, methods are provided for treating proliferative diabetic retinopathy, comprising the step of administering to a patient a therapeutically effective amount of a polynucleotide, polypeptide, antagonist and/or agonist to the eyes, such that the formation of blood vessels is inhibited.

[0853] Within particularly preferred embodiments of the invention, proliferative diabetic retinopathy may be treated by injection into the aqueous humor or the vitreous, in order to increase the local concentration of the polynucleotide, polypeptide, antagonist and/or agonist in the retina. Preferably, this treatment should be initiated prior to the acquisition of severe disease requiring photocoagulation.

[0854] Within another aspect of the present invention, methods are provided for treating retrolental fibroplasia, comprising the step of administering to a patient a therapeutically effective amount of a polynucleotide, polypeptide, antagonist and/or agonist to the eye, such that the formation of blood vessels is inhibited. The compound may be administered topically, via intravitreous injection and/or via intraocular implants.

[0855] Additionally, disorders which can be treated with the polynucleotides, polypeptides, agonists and/or agonists include, but are not limited to, hemangioma, arthritis, psoriasis, angiofibroma, atherosclerotic plaques, delayed wound healing, granulations, hemophilic joints, hypertrophic scars, nonunion fractures, Osler-Weber syndrome, pyogenic granuloma, scleroderma, trachoma, and vascular adhesions.

[0856] Moreover, disorders and/or states, which can be treated, prevented, diagnosed, and/or prognosed with the the polynucleotides, polypeptides, agonists and/or agonists of the invention include, but are not limited to, solid tumors, blood born tumors such as leukemias, tumor metastasis, Kaposi's sarcoma, benign tumors, for example hemangiomas, acoustic neuromas, neurofibromas, trachomas, and pyogenic granulomas, rheumatoid arthritis, psoriasis, ocular angiogenic diseases, for example, diabetic retinopathy, retinopathy of prematurity, macular degeneration, corneal graft rejection, neovascular glaucoma, retrolental fibroplasia, rubeosis, retinoblastoma, and uvietis, delayed wound healing, endometriosis, vascluogenesis, granulations, hypertrophic scars (keloids), nonunion fractures, scleroderma, trachoma, vascular adhesions, myocardial angiogenesis, coronary collaterals, cerebral collaterals, arteriovenous malformations, ischemic limb angiogenesis, Osler-Webber Syndrome, plaque neovascularization, telangiectasia, hemophiliac joints, angiofibroma fibromuscular dysplasia, wound granulation, Crohn's disease, atherosclerosis, birth control agent by preventing vascularization required for embryo implantation controlling menstruation, diseases that have angiogenesis as a pathologic consequence such as cat scratch disease (Rochele minalia quintosa), ulcers (Helicobacter pylori), Bartonellosis and bacillary angiomatosis.

[0857] In one aspect of the birth control method, an amount of the compound sufficient to block embryo implantation is administered before or after intercourse and fertilization have occurred, thus providing an effective method of birth control, possibly a “morning after” method. Polynucleotides, polypeptides, agonists and/or agonists may also be used in controlling menstruation or administered as either a peritoneal lavage fluid or for peritoneal implantation in the treatment of endometriosis.

[0858] Polynucleotides, polypeptides, agonists and/or agonists of the present invention may be incorporated into surgical sutures in order to prevent stitch granulomas.

[0859] Polynucleotides, polypeptides, agonists and/or agonists may be utilized in a wide variety of surgical procedures. For example, within one aspect of the present invention a compositions (in the form of, for example, a spray or film) may be utilized to coat or spray an area prior to removal of a tumor, in order to isolate normal surrounding tissues from malignant tissue, and/or to prevent the spread of disease to surrounding tissues. Within other aspects of the present invention, compositions (e.g., in the form of a spray) may be delivered via endoscopic procedures in order to coat tumors, or inhibit angiogenesis in a desired locale. Within yet other aspects of the present invention, surgical meshes which have been coated with anti-angiogenic compositions of the present invention may be utilized in any procedure wherein a surgical mesh might be utilized. For example, within one embodiment of the invention a surgical mesh laden with an anti-angiogenic composition may be utilized during abdominal cancer resection surgery (e.g., subsequent to colon resection) in order to provide support to the structure, and to release an amount of the anti-angiogenic factor.

[0860] Within further aspects of the present invention, methods are provided for treating tumor excision sites, comprising administering a polynucleotide, polypeptide, agonist and/or agonist to the resection margins of a tumor subsequent to excision, such that the local recurrence of cancer and the formation of new blood vessels at the site is inhibited. Within one embodiment of the invention, the anti-angiogenic compound is administered directly to the tumor excision site (e.g., applied by swabbing, brushing or otherwise coating the resection margins of the tumor with the anti-angiogenic compound). Alternatively, the anti-angiogenic compounds may be incorporated into known surgical pastes prior to administration. Within particularly preferred embodiments of the invention, the anti-angiogenic compounds are applied after hepatic resections for malignancy, and after neurosurgical operations.

[0861] Within one aspect of the present invention, polynucleotides, polypeptides, agonists and/or agonists may be administered to the resection margin of a wide variety of tumors, including for example, breast, colon, brain and hepatic tumors. For example, within one embodiment of the invention, anti-angiogenic compounds may be administered to the site of a neurological tumor subsequent to excision, such that the formation of new blood vessels at the site are inhibited.

[0862] The polynucleotides, polypeptides, agonists and/or agonists of the present invention may also be administered along with other anti-angiogenic factors. Representative examples of other anti-angiogenic factors include: Anti-Invasive Factor, retinoic acid and derivatives thereof, paclitaxel, Suramin, Tissue Inhibitor of Metalloproteinase-1, Tissue Inhibitor of Metalloproteinase-2, Plasminogen Activator Inhibitor-1, Plasminogen Activator Inhibitor-2, and various forms of the lighter “d group” transition metals.

[0863] Lighter “d group” transition metals include, for example, vanadium, molybdenum, tungsten, titanium, niobium, and tantalum species. Such transition metal species may form transition metal complexes. Suitable complexes of the above-mentioned transition metal species include oxo transition metal complexes.

[0864] Representative examples of vanadium complexes include oxo vanadium complexes such as vanadate and vanadyl complexes. Suitable vanadate complexes include metavanadate and orthovanadate complexes such as, for example, ammonium metavanadate, sodium metavanadate, and sodium orthovanadate. Suitable vanadyl complexes include, for example, vanadyl acetylacetonate and vanadyl sulfate including vanadyl sulfate hydrates such as vanadyl sulfate mono- and trihydrates.

[0865] Representative examples of tungsten and molybdenum complexes also include oxo complexes. Suitable oxo tungsten complexes include tungstate and tungsten oxide complexes. Suitable tungstate complexes include ammonium tungstate, calcium tungstate, sodium tungstate dihydrate, and tungstic acid. Suitable tungsten oxides include tungsten (IV) oxide and tungsten (VI) oxide. Suitable oxo molybdenum complexes include molybdate, molybdenum oxide, and molybdenyl complexes. Suitable molybdate complexes include ammonium molybdate and its hydrates, sodium molybdate and its hydrates, and potassium molybdate and its hydrates. Suitable molybdenum oxides include molybdenum (VI) oxide, molybdenum (VI) oxide, and molybdic acid. Suitable molybdenyl complexes include, for example, molybdenyl acetylacetonate. Other suitable tungsten and molybdenum complexes include hydroxo derivatives derived from, for example, glycerol, tartaric acid, and sugars.

[0866] A wide variety of other anti-angiogenic factors may also be utilized within the context of the present invention. Representative examples include platelet factor 4; protamine sulphate; sulphated chitin derivatives (prepared from queen crab shells), (Murata et al., Cancer Res. 51:22-26, 1991); Sulphated Polysaccharide Peptidoglycan Complex (SP-PG) (the function of this compound may be enhanced by the presence of steroids such as estrogen, and tamoxifen citrate); Staurosporine; modulators of matrix metabolism, including for example, proline analogs, cishydroxyproline, d,L-3,4-dehydroproline, Thiaproline, alpha,alpha-dipyridyl, aminopropionitrile fumarate; 4-propyl-5-(4-pyridinyl)-2(3H)-oxazolone; Methotrexate; Mitoxantrone; Heparin; Interferons; 2 Macroglobulin-serum; ChIMP-3 (Pavloff et al., J. Bio. Chem. 267:17321-17326, 1992); Chymostatin (Tomikinson et al., Biochem J. 286:475-480, 1992); Cyclodextrin Tetradecasulfate; Eponemycin; Camptothecin; Fumagillin (Ingber et al., Nature 348:555-557, 1990); Gold Sodium Thiomalate (“GST”; Matsubara and Ziff, J. Clin. Invest. 79:1440-1446, 1987); anticollagenase-serum; alpha2-antiplasmin (Holmes et al., J. Biol. Chem. 262(4):1659-1664, 1987); Bisantrene (National Cancer Institute); Lobenzarit disodium (N-(2)-carboxyphenyl-4-chloroanthronilic acid disodium or “CCA”; Takeuchi et al., Agents Actions 36:312-316, 1992); Thalidomide; Angostatic steroid; AGM-1470; carboxynaminolmidazole; and metalloproteinase inhibitors such as BB94.

Diseases at the Cellular Level

[0867] Diseases associated with increased cell survival or the inhibition of apoptosis that could be treated, prevented, diagnosed, and/or prognosed using polynucleotides or polypeptides, as well as antagonists or agonists of the present invention, include cancers (such as follicular lymphomas, carcinomas with p53 mutations, and hormone-dependent tumors, including, but not limited to colon cancer, cardiac tumors, pancreatic cancer, melanoma, retinoblastoma, glioblastoma, lung cancer, intestinal cancer, testicular cancer, stomach cancer, neuroblastoma, myxoma, myoma, lymphoma, endothelioma, osteoblastoma, osteoclastoma, osteosarcoma, chondrosarcoma, adenoma, breast cancer, prostate cancer, Kaposi's sarcoma and ovarian cancer); autoimmune disorders (such as, multiple sclerosis, Sjogren's syndrome, Hashimoto's thyroiditis, biliary cirrhosis, Behcet's disease, Crohn's disease, polymyositis, systemic lupus erythematosus and immune-related glomerulonephritis and rheumatoid arthritis) and viral infections (such as herpes viruses, pox viruses and adenoviruses), inflammation, graft v. host disease, acute graft rejection, and chronic graft rejection.

[0868] In preferred embodiments, polynucleotides, polypeptides, and/or antagonists of the invention are used to inhibit growth, progression, and/or metasis of cancers, in particular those listed above.

[0869] Additional diseases or conditions associated with increased cell survival that could be treated or detected by polynucleotides or polypeptides, or agonists or antagonists of the present invention include, but are not limited to, progression, and/or metastases of malignancies and related disorders such as leukemia (including acute leukemias (e.g., acute lymphocytic leukemia, acute myelocytic leukemia (including myeloblastic, promyelocytic, myelomonocytic, monocytic, and erythroleukemia)) and chronic leukemias (e.g., chronic myelocytic (granulocytic) leukemia and chronic lymphocytic leukemia)), polycythemia vera, lymphomas (e.g., Hodgkin's disease and non-Hodgkin's disease), multiple myeloma, Waldenstrom's macroglobulinemia, heavy chain disease, and solid tumors including, but not limited to, sarcomas and carcinomas such as fibrosarcoma, myxosarcoma, liposarcoma, chondrosarcoma, osteogenic sarcoma, chordoma, angiosarcoma, endotheliosarcoma, lymphangiosarcoma, lymphangioendotheliosarcoma, synovioma, mesothelioma, Ewing's tumor, leiomyosarcoma, rhabdomyosarcoma, colon carcinoma, pancreatic cancer, breast cancer, ovarian cancer, prostate cancer, squamous cell carcinoma, basal cell carcinoma, adenocarcinoma, sweat gland carcinoma, sebaceous gland carcinoma, papillary carcinoma, papillary adenocarcinomas, cystadenocarcinoma, medullary carcinoma, bronchogenic carcinoma, renal cell carcinoma, hepatoma, bile duct carcinoma, choriocarcinoma, seminoma, embryonal carcinoma, Wilm's tumor, cervical cancer, testicular tumor, lung carcinoma, small cell lung carcinoma, bladder carcinoma, epithelial carcinoma, glioma, astrocytoma, medulloblastoma, craniopharyngioma, ependymoma, pinealoma, hemangioblastoma, acoustic neuroma, oligodendroglioma, menangioma, melanoma, neuroblastoma, and retinoblastoma.

[0870] Diseases associated with increased apoptosis that could be treated, prevented, diagnosed, and/or prognesed using polynucleotides or polypeptides, as well as agonists or antagonists of the present invention, include, but are not limited to, AIDS; neurodegenerative disorders (such as Alzheimer's disease, Parkinson's disease, Amyotrophic lateral sclerosis, Retinitis pigmentosa, Cerebellar degeneration and brain tumor or prior associated disease); autoimmune disorders (such as, multiple sclerosis, Sjogren's syndrome, Hashimoto's thyroiditis, biliary cirrhosis, Behcet's disease, Crohn's disease, polymyositis, systemic lupus erythematosus and immune-related glomerulonephritis and rheumatoid arthritis) myelodysplastic syndromes (such as aplastic anemia), graft v. host disease, ischemic injury (such as that caused by myocardial infarction, stroke and reperfusion injury), liver injury (e.g., hepatitis related liver injury, ischemia/reperfusion injury, cholestosis (bile duct injury) and liver cancer); toxin-induced liver disease (such as that caused by alcohol), septic shock, cachexia and anorexia.

[0871] Wound Healing and Epithelial Cell Proliferation

[0872] In accordance with yet a further aspect of the present invention, there is provided a process for utilizing polynucleotides or polypeptides, as well as agonists or antagonists of the present invention, for therapeutic purposes, for example, to stimulate epithelial cell proliferation and basal keratinocytes for the purpose of wound healing, and to stimulate hair follicle production and healing of dermal wounds. Polynucleotides or polypeptides, as well as agonists or antagonists of the present invention, may be clinically useful in stimulating wound healing including surgical wounds, excisional wounds, deep wounds involving damage of the dermis and epidermis, eye tissue wounds, dental tissue wounds, oral cavity wounds, diabetic ulcers, dermal ulcers, cubitus ulcers, arterial ulcers, venous stasis ulcers, burns resulting from heat exposure or chemicals, and other abnormal wound healing conditions such as uremia, malnutrition, vitamin deficiencies and complications associated with systemic treatment with steroids, radiation therapy and antineoplastic drugs and antimetabolites. Polynucleotides or polypeptides, as well as agonists or antagonists of the present invention, could be used to promote dermal reestablishment subsequent to dermal loss

[0873] Polynucleotides or polypeptides, as well as agonists or antagonists of the present invention, could be used to increase the adherence of skin grafts to a wound bed and to stimulate re-epithelialization from the wound bed. The following are types of grafts that polynucleotides or polypeptides, agonists or antagonists of the present invention, could be used to increase adherence to a wound bed: autografts, artificial skin, allografts, autodermic graft, autoepdermic grafts, avacular grafts, Blair-Brown grafts, bone graft, brephoplastic grafts, cútis graft, delayed graft, dermic graft, epidermic graft, fascia graft, full thickness graft, heterologous graft, xenograft, homologous graft, hyperplastic graft, lamellar graft, mesh graft, mucosal graft, Ollier-Thiersch graft, omenpal graft, patch graft, pedicle graft, penetrating graft, split skin graft, thick split graft. Polynucleotides or polypeptides, as well as agonists or antagonists of the present invention, can be used to promote skin strength and to improve the appearance of aged skin.

[0874] It is believed that polynucleotides or polypeptides, as well as agonists or antagonists of the present invention, will also produce changes in hepatocyte proliferation, and epithelial cell proliferation in the lung, breast, pancreas, stomach, small intestine, and large intestine. Polynucleotides or polypeptides, as well as agonists or antagonists of the present invention, could promote proliferation of epithelial cells such as sebocytes, hair follicles, hepatocytes, type II pneumocytes, mucin-producing goblet cells, and other epithelial cells and their progenitors contained within the skin, lung, liver, and gastrointestinal tract. Polynucleotides or polypeptides, agonists or antagonists of the present invention, may promote proliferation of endothelial cells, keratinocytes, and basal keratinocytes.

[0875] Polynucleotides or polypeptides, as well as agonists or antagonists of the present invention, could also be used to reduce the side effects of gut toxicity that result from radiation, chemotherapy treatments or viral infections. Polynucleotides or polypeptides, as well as agonists or antagonists of the present invention, may have a cytoprotective effect on the small intestine mucosa. Polynucleotides or polypeptides, as well as agonists or antagonists of the present invention, may also stimulate healing of mucositis (mouth ulcers) that result from chemotherapy and viral infections.

[0876] Polynucleotides or polypeptides, as well as agonists or antagonists of the present invention, could further be used in full regeneration of skin in full and partial thickness skin defects, including burns, (i.e., repopulation of hair follicles, sweat glands, and sebaceous glands), treatment of other skin defects such as psoriasis. Polynucleotides or polypeptides, as well as agonists or antagonists of the present invention, could be used to treat epidermolysis bullosa, a defect in adherence of the epidermis to the underlying dermis which results in frequent, open and painful blisters by accelerating reepithelialization of these lesions. Polynucleotides or polypeptides, as well as agonists or antagonists of the present invention, could also be used to treat gastric and doudenal ulcers and help heal by scar formation of the mucosal lining and regeneration of glandular mucosa and duodenal mucosal lining more rapidly. Inflammatory bowel diseases, such as Crohn's disease and ulcerative colitis, are diseases which result in destruction of the mucosal surface of the small or large intestine, respectively. Thus, polynucleotides or polypeptides, as well as agonists or antagonists of the present invention, could be used to promote the resurfacing of the mucosal surface to aid more rapid healing and to prevent progression of inflammatory bowel disease. Treatment with polynucleotides or polypeptides, agonists or antagonists of the present invention, is expected to have a significant effect on the production of mucus throughout the gastrointestinal tract and could be used to protect the intestinal mucosa from injurious substances that are ingested or following surgery. Polynucleotides or polypeptides, as well as agonists or antagonists of the present invention, could be used to treat diseases associate with the under expression.

[0877] Moreover, polynucleotides or polypeptides, as well as agonists or antagonists of the present invention, could be used to prevent and heal damage to the lungs due to various pathological states. Polynucleotides or polypeptides, as well as agonists or antagonists of the present invention, which could stimulate proliferation and differentiation and promote the repair of alveoli and brochiolar epithelium to prevent or treat acute or chronic lung damage. For example, emphysema, which results in the progressive loss of aveoli, and inhalation injuries, i.e., resulting from smoke inhalation and burns, that cause necrosis of the bronchiolar epithelium and alveoli could be effectively treated using polynucleotides or polypeptides, agonists or antagonists of the present invention. Also, polynucleotides or polypeptides, as well as agonists or antagonists of the present invention, could be used to stimulate the proliferation of and differentiation of type II pneumocytes, which may help treat or prevent disease such as hyaline membrane diseases, such as infant respiratory distress syndrome and bronchopulmonary displasia, in premature infants.

[0878] Polynucleotides or polypeptides, as well as agonists or antagonists of the present invention, could stimulate the proliferation and differentiation of hepatocytes and, thus, could be used to alleviate or treat liver diseases and pathologies such as fulminant liver failure caused by cirrhosis, liver damage caused by viral hepatitis and toxic substances (i.e., acetaminophen, carbon tetraholoride and other hepatotoxins known in the art).

[0879] In addition, polynucleotides or polypeptides, as well as agonists or antagonists of the present invention, could be used treat or prevent the onset of diabetes mellitus. In patients with newly diagnosed Types I and II diabetes, where some islet cell function remains, polynucleotides or polypeptides, as well as agonists or antagonists of the present invention, could be used to maintain the islet function so as to alleviate, delay or prevent permanent manifestation of the disease. Also, polynucleotides or polypeptides, as well as agonists or antagonists of the present invention, could be used as an auxiliary in islet cell transplantation to improve or promote islet cell function.

Neural Activity and Neurological Diseases

[0880] The polynucleotides, polypeptides and agonists or antagonists of the invention may be used for the diagnosis and/or treatment of diseases, disorders, damage or injury of the brain and/or nervous system. Nervous system disorders that can be treated with the compositions of the invention (e.g., polypeptides, polynucleotides, and/or agonists or antagonists), include, but are not limited to, nervous system injuries, and diseases or disorders which result in either a disconnection of axons, a diminution or degeneration of neurons, or demyelination. Nervous system lesions which may be treated in a patient (including human and non-human mammalian patients) according to the methods of the invention, include but are not limited to, the following lesions of either the central (including spinal cord, brain) or peripheral nervous systems: (1) ischemic lesions, in which a lack of oxygen in a portion of the nervous system results in neuronal injury or death, including cerebral infarction or ischemia, or spinal cord infarction or ischemia; (2) traumatic lesions, including lesions caused by physical injury or associated with surgery, for example, lesions which sever a portion of the nervous system, or compression injuries; (3) malignant lesions, in which a portion of the nervous system is destroyed or injured by malignant tissue which is either a nervous system associated malignancy or a malignancy derived from non-nervous system tissue; (4) infectious lesions, in which a portion of the nervous system is destroyed or injured as a result of infection, for example, by an abscess or associated with infection by human immunodeficiency virus, herpes zoster, or herpes simplex virus or with Lyme disease, tuberculosis, or syphilis; (5) degenerative lesions, in which a portion of the nervous system is destroyed or injured as a result of a degenerative process including but not limited to, degeneration associated with Parkinson's disease, Alzheimer's disease, Huntington's chorea, or amyotrophic lateral sclerosis (ALS); (6) lesions associated with nutritional diseases or disorders, in which a portion of the nervous system is destroyed or injured by a nutritional disorder or disorder of metabolism including, but not limited to, vitamin B12 deficiency, folic acid deficiency, Wernicke disease, tobacco-alcohol amblyopia, Marchiafava-Bignami disease (primary degeneration of the corpus callosum), and alcoholic cerebellar degeneration; (7) neurological lesions associated with systemic diseases including, but not limited to, diabetes (diabetic neuropathy, Bell's palsy), systemic lupus erythematosus, carcinoma, or sarcoidosis; (8) lesions caused by toxic substances including alcohol, lead, or particular neurotoxins; and (9) demyelinated lesions in which a portion of the nervous system is destroyed or injured by a demyelinating disease including, but not limited to, multiple sclerosis, human immunodeficiency virus-associated myelopathy, transverse myelopathy or various etiologies, progressive multifocal leukoencephalopathy, and central pontine myelinolysis.

[0881] In one embodiment, the polypeptides, polynucleotides, or agonists or antagonists of the invention are used to protect neural cells from the damaging effects of hypoxia. In a further preferred embodiment, the polypeptides, polynucleotides, or agonists or antagonists of the invention are used to protect neural cells from the damaging effects of cerebral hypoxia. According to this embodiment, the compositions of the invention are used to treat or prevent neural cell injury associated with cerebral hypoxia. In one non-exclusive aspect of this embodiment, the polypeptides, polynucleotides, or agonists or antagonists of the invention, are used to treat or prevent neural cell injury associated with cerebral ischemia. In another non-exclusive aspect of this embodiment, the polypeptides, polynucleotides, or agonists or antagonists of the invention are used to treat or prevent neural cell injury associated with cerebral infarction.

[0882] In another preferred embodiment, the polypeptides, polynucleotides, or agonists or antagonists of the invention are used to treat or prevent neural cell injury associated with a stroke. In a specific embodiment, the polypeptides, polynucleotides, or agonists or antagonists of the invention are used to treat or prevent cerebral neural cell injury associated with a stroke.

[0883] In another preferred embodiment, the polypeptides, polynucleotides, or agonists or antagonists of the invention are used to treat or prevent neural cell injury associated with a heart attack. In a specific embodiment, the polypeptides, polynucleotides, or agonists or antagonists of the invention are used to treat or prevent cerebral neural cell injury associated with a heart attack.

[0884] The compositions of the invention which are useful for treating or preventing a nervous system disorder may be selected by testing for biological activity in promoting the survival or differentiation of neurons. For example, and not by way of limitation, compositions of the invention which elicit any of the following effects may be useful according to the invention: (1) increased survival time of neurons in culture either in the presence or absence of hypoxia or hypoxic conditions; (2) increased sprouting of neurons in culture or in vivo; (3) increased production of a neuron-associated molecule in culture or in vivo, e.g., choline acetyltransferase or acetylcholinesterase with respect to motor neurons; or (4) decreased symptoms of neuron dysfunction in vivo. Such effects may be measured by any method known in the art. In preferred, non-limiting embodiments, increased survival of neurons may routinely be measured using a method set forth herein or otherwise known in the art, such as, for example, in Zhang et al., Proc Natl Acad Sci USA 97:3637-42 (2000) or in Arakawa et al., J. Neurosci., 10:3507-15 (1990); increased sprouting of neurons may be detected by methods known in the art, such as, for example, the methods set forth in Pestronk et al., Exp. Neurol., 70:65-82 (1980), or Brown et al., Ann. Rev. Neurosci., 4:17-42 (1981); increased production of neuron-associated molecules may be measured by bioassay, enzymatic assay, antibody binding, Northern blot assay, etc., using techniques known in the art and depending on the molecule to be measured; and motor neuron dysfunction may be measured by assessing the physical manifestation of motor neuron disorder, e.g., weakness, motor neuron conduction velocity, or functional disability.

[0885] In specific embodiments, motor neuron disorders that may be treated according to the invention include, but are not limited to, disorders such as infarction, infection, exposure to toxin, trauma, surgical damage, degenerative disease or malignancy that may affect motor neurons as well as other components of the nervous system, as well as disorders that selectively affect neurons such as amyotrophic lateral sclerosis, and including, but not limited to, progressive spinal muscular atrophy, progressive bulbar palsy, primary lateral sclerosis, infantile and juvenile muscular atrophy, progressive bulbar paralysis of childhood (Fazio-Londe syndrome), poliomyelitis and the post polio syndrome, and Hereditary Motorsensory Neuropathy (Charcot-Marie-Tooth Disease).

[0886] Further, polypeptides or polynucleotides of the invention may play a role in neuronal survival; synapse formation; conductance; neural differentiation, etc. Thus, compositions of the invention (including polynucleotides, polypeptides, and agonists or antagonists) may be used to diagnose and/or treat or prevent diseases or disorders associated with these roles, including, but not limited to, learning and/or cognition disorders. The compositions of the invention may also be useful in the treatment or prevention of neurodegenerative disease states and/or behavioural disorders. Such neurodegenerative disease states and/or behavioral disorders include, but are not limited to, Alzheimer's Disease, Parkinson's Disease, Huntington's Disease, Tourette Syndrome, schizophrenia, mania, dementia, paranoia, obsessive compulsive disorder, panic disorder, learning disabilities, ALS, psychoses, autism, and altered behaviors, including disorders in feeding, sleep patterns, balance, and perception. In addition, compositions of the invention may also play a role in the treatment, prevention and/or detection of developmental disorders associated with the developing embryo, or sexually-linked disorders.

[0887] Additionally, polypeptides, polynucleotides and/or agonists or antagonists of the invention, may be useful in protecting neural cells from diseases, damage, disorders, or injury, associated with cerebrovascular disorders including, but not limited to, carotid artery diseases (e.g., carotid artery thrombosis, carotid stenosis, or Moyamoya Disease), cerebral amyloid angiopathy, cerebral aneurysm, cerebral anoxia, cerebral arteriosclerosis, cerebral arteriovenous malformations, cerebral artery diseases, cerebral embolism and thrombosis (e.g., carotid artery thrombosis, sinus thrombosis, or Wallenberg's Syndrome), cerebral hemorrhage (e.g., epidural or subdural hematoma, or subarachnoid hemorrhage), cerebral infarction, cerebral ischemia (e.g., transient cerebral ischemia, Subclavian Steal Syndrome, or vertebrobasilar insufficiency), vascular dementia (e.g., multi-infarct), leukomalacia, periventricular, and vascular headache (e.g., cluster headache or migraines).

[0888] In accordance with yet a further aspect of the present invention, there is provided a process for utilizing polynucleotides or polypeptides, as well as agonists or antagonists of the present invention, for therapeutic purposes, for example, to stimulate neurological cell proliferation and/or differentiation. Therefore, polynucleotides, polypeptides, agonists and/or antagonists of the invention may be used to treat and/or detect neurologic diseases. Moreover, polynucleotides or polypeptides, or agonists or antagonists of the invention, can be used as a marker or detector of a particular nervous system disease or disorder.

[0889] Examples of neurologic diseases which can be treated or detected with polynucleotides, polypeptides, agonists, and/or antagonists of the present invention include brain diseases, such as metabolic brain diseases which includes phenylketonuria such as maternal phenylketonuria, pyruvate carboxylase deficiency, pyruvate dehydrogenase complex deficiency, Wernicke's Encephalopathy, brain edema, brain neoplasms such as cerebellar neoplasms which include infratentorial neoplasms, cerebral ventricle neoplasms such as choroid plexus neoplasms, hypothalamic neoplasms, supratentorial neoplasms, canavan disease, cerebellar diseases such as cerebellar ataxia which include spinocerebellar degeneration such as ataxia telangiectasia, cerebellar dyssynergia, Friederich's Ataxia, Machado-Joseph Disease, olivopontocerebellar atrophy, cerebellar neoplasms such as infratentorial neoplasms, diffuse cerebral sclerosis such as encephalitis periaxialis, globoid cell leukodystrophy, metachromatic leukodystrophy and subacute sclerosing panencephalitis.

[0890] Additional neurologic diseases which can be treated or detected with polynucleotides, polypeptides, agonists, and/or antagonists of the present invention include cerebrovascular disorders (such as carotid artery diseases which include carotid artery thrombosis, carotid stenosis and Moyamoya Disease), cerebral amyloid angiopathy, cerebral aneurysm, cerebral anoxia, cerebral arteriosclerosis, cerebral arteriovenous malformations, cerebral artery diseases, cerebral embolism and thrombosis such as carotid artery thrombosis, sinus thrombosis and Wallenberg's Syndrome, cerebral hemorrhage such as epidural hematoma, subdural hematoma and subarachnoid hemorrhage, cerebral infarction, cerebral ischemia such as transient cerebral ischemia, Subclavian Steal Syndrome and vertebrobasilar insufficiency, vascular dementia such as multi-infarct dementia, periventricular leukomalacia, vascular headache such as cluster headache and migraine.

[0891] Additional neurologic diseases which can be treated or detected with polynucleotides, polypeptides, agonists, and/or antagonists of the present invention include dementia such as AIDS Dementia Complex, presenile dementia such as Alzheimer's Disease and Creutzfeldt-Jakob Syndrome, senile dementia such as Alzheimer's Disease and progressive supranuclear palsy, vascular dementia such as multi-infarct dementia, encephalitis which include encephalitis periaxialis, viral encephalitis such as epidemic encephalitis, Japanese Encephalitis, St. Louis Encephalitis, tick-borne encephalitis and West Nile Fever, acute disseminated encephalomyelitis, meningoencephalitis such as uveomeningoencephalitic syndrome, Postencephalitic Parkinson Disease and subacute sclerosing panencephalitis, encephalomalacia such as periventricular leukomalacia, epilepsy such as generalized epilepsy which includes infantile spasms, absence epilepsy, myoclonic epilepsy which includes MERRF Syndrome, tonic-clonic epilepsy, partial epilepsy such as complex partial epilepsy, frontal lobe epilepsy and temporal lobe epilepsy, post-traumatic epilepsy, status epilepticus such as Epilepsia Partialis Continua, and Hallervorden-Spatz Syndrome.

[0892] Additional neurologic diseases which can be treated or detected with polynucleotides, polypeptides, agonists, and/or antagonists of the present invention include hydrocephalus such as Dandy-Walker Syndrome and normal pressure hydrocephalus, hypothalamic diseases such as hypothalamic neoplasms, cerebral malaria, narcolepsy which includes cataplexy, bulbar poliomyelitis, cerebri pseudotumor, Rett Syndrome, Reye's Syndrome, thalamic diseases, cerebral toxoplasmosis, intracranial tuberculoma and Zellweger Syndrome, central nervous system infections such as AIDS Dementia Complex, Brain Abscess, subdural empyema, encephalomyelitis such as Equine Encephalomyelitis, Venezuelan Equine Encephalomyelitis, Necrotizing Hemorrhagic Encephalomyelitis, Visna, and cerebral malaria.

[0893] Additional neurologic diseases which can be treated or detected with polynucleotides, polypeptides, agonists, and/or antagonists of the present invention include meningitis such as arachnoiditis, aseptic meningtitis such as viral meningtitis which includes lymphocytic choriomeningitis, Bacterial meningtitis which includes Haemophilus Meningtitis, Listeria Meningtitis, Meningococcal Meningtitis such as Waterhouse-Friderichsen Syndrome, Pneumococcal Meningtitis and meningeal tuberculosis, fungal meningitis such as Cryptococcal Meningtitis, subdural effusion, meningoencephalitis such as uvemeningoencephalitic syndrome, myelitis such as transverse myelitis, neurosyphilis such as tabes dorsalis, poliomyelitis which includes bulbar poliomyelitis and postpoliomyelitis syndrome, prion diseases (such as Creutzfeldt-Jakob Syndrome, Bovine Spongiform Encephalopathy, Gerstmann-Straussler Syndrome, Kuru, Scrapie), and cerebral toxoplasmosis.

[0894] Additional neurologic diseases which can be treated or detected with polynucleotides, polypeptides, agonists, and/or antagonists of the present invention include central nervous system neoplasms such as brain neoplasms that include cerebellar neoplasms such as infratentorial neoplasms, cerebral ventricle neoplasms such as choroid plexus neoplasms, hypothalamic neoplasms and supratentorial neoplasms, meningeal neoplasms, spinal cord neoplasms which include epidural neoplasms, demyelinating diseases such as Canavan Diseases, diffuse cerebral sceloris which includes adrenoleukodystrophy, encephalitis periaxialis, globoid cell leukodystrophy, diffuse cerebral sclerosis such as metachromatic leukodystrophy, allergic encephalomyelitis, necrotizing hemorrhagic encephalomyelitis, progressive multifocal leukoencephalopathy, multiple sclerosis, central pontine myelinolysis, transverse myelitis, neuromyelitis optica, Scrapie, Swayback, Chronic Fatigue Syndrome, Visna, High Pressure Nervous Syndrome, Meningism, spinal cord diseases such as amyotonia congenita, amyotrophic lateral sclerosis, spinal muscular atrophy such as Werdnig-Hoffmann Disease, spinal cord compression, spinal cord neoplasms such as epidural neoplasms, syringomyelia, Tabes Dorsalis, Stiff-Man Syndrome, mental retardation such as Angelman Syndrome, Cri-du-Chat Syndrome, De Lange's Syndrome, Down Syndrome, Gangliosidoses such as gangliosidoses G(M1), Sandhoff Disease, Tay-Sachs Disease, Hartnup Disease, homocystinuria, Laurence-Moon-Biedl Syndrome, Lesch-Nyhan Syndrome, Maple Syrup Urine Disease, mucolipidosis such as fucosidosis, neuronal ceroid-lipofuscinosis, oculocerebrorenal syndrome, phenylketonuria such as maternal phenylketonuria, Prader-Willi Syndrome, Rett Syndrome, Rubinstein-Taybi Syndrome, Tuberous Sclerosis, WAGR Syndrome, nervous system abnormalities such as holoprosencephaly, neural tube defects such as anencephaly which includes hydrangencephaly, Arnold-Chairi Deformity, encephalocele, meningocele, meningomyelocele, spinal dysraphism such as spina bifida cystica and spina bifida occulta.

[0895] Additional neurologic diseases which can be treated or detected with polynucleotides, polypeptides, agonists, and/or antagonists of the present invention include hereditary motor and sensory neuropathies which include Charcot-Marie Disease, Hereditary optic atrophy, Refsum's Disease, hereditary spastic paraplegia, Werdnig-Hoffmann Disease, Hereditary Sensory and Autonomic Neuropathies such as Congenital Analgesia and Familial Dysautonomia, Neurologic manifestations (such as agnosia that include Gerstmann's Syndrome, Amnesia such as retrograde amnesia, apraxia, neurogenic bladder, cataplexy, communicative disorders such as hearing disorders that includes deafness, partial hearing loss, loudness recruitment and tinnitus, language disorders such as aphasia which include agraphia, anomia, broca aphasia, and Wernicke Aphasia, Dyslexia such as Acquired Dyslexia, language development disorders, speech disorders such as aphasia which includes anomia, broca aphasia and Wernicke Aphasia, articulation disorders, communicative disorders such as speech disorders which include dysarthria, echolalia, mutism and stuttering, voice disorders such as aphonia and hoarseness, decerebrate state, delirium, fasciculation, hallucinations, meningism, movement disorders such as angelman syndrome, ataxia, athetosis, chorea, dystonia, hypokinesia, muscle hypotonia, myoclonus, tic, torticollis and tremor, muscle hypertonia such as muscle rigidity such as stiff-man syndrome, muscle spasticity, paralysis such as facial paralysis which includes Herpes Zoster Oticus, Gastroparesis, Hemiplegia, ophthalmoplegia such as diplopia, Duane's Syndrome, Horner's Syndrome, Chronic progressive external ophthalmoplegia such as Kearns Syndrome, Bulbar Paralysis, Tropical Spastic Paraparesis, Paraplegia such as Brown-Sequard Syndrome, quadriplegia, respiratory paralysis and vocal cord paralysis, paresis, phantom limb, taste disorders such as ageusia and dysgeusia, vision disorders such as amblyopia, blindness, color vision defects, diplopia, hemianopsia, scotoma and subnormal vision, sleep disorders such as hypersomnia which includes Kleine-Levin Syndrome, insomnia, and somnambulism, spasm such as trismus, unconsciousness such as coma, persistent vegetative state and syncope and vertigo, neuromuscular diseases such as amyotonia congenita, amyotrophic lateral sclerosis, Lambert-Eaton Myasthenic Syndrome, motor neuron disease, muscular atrophy such as spinal muscular atrophy, Charcot-Marie Disease and Werdnig-Hoffmann Disease, Postpoliomyelitis Syndrome, Muscular Dystrophy, Myasthenia Gravis, Myotonia Atrophica, Myotonia Confenita, Nemaline Myopathy, Familial Periodic Paralysis, Multiplex Paramyloclonus, Tropical Spastic Paraparesis and Stiff-Man Syndrome, peripheral nervous system diseases such as acrodynia, amyloid neuropathies, autonomic nervous system diseases such as Adie's Syndrome, Barre-Lieou Syndrome, Familial Dysautonomia, Horner's Syndrome, Reflex Sympathetic Dystrophy and Shy-Drager Syndrome, Cranial Nerve Diseases such as Acoustic Nerve Diseases such as Acoustic Neuroma which includes Neurofibromatosis 2, Facial Nerve Diseases such as Facial Neuralgia,Melkersson-Rosenthal Syndrome, ocular motility disorders which includes amblyopia, nystagmus, oculomotor nerve paralysis, ophthalmoplegia such as Duane's Syndrome, Horner's Syndrome, Chronic Progressive External Ophthalmoplegia which includes Kearns Syndrome, Strabismus such as Esotropia and Exotropia, Oculomotor Nerve Paralysis, Optic Nerve Diseases such as Optic Atrophy which includes Hereditary Optic Atrophy, Optic Disk Drusen, Optic Neuritis such as Neuromyelitis Optica, Papilledema, Trigeminal Neuralgia, Vocal Cord Paralysis, Demyelinating Diseases such as Neuromyelitis Optica and Swayback, and Diabetic neuropathies such as diabetic foot.

[0896] Additional neurologic diseases which can be treated or detected with polynucleotides, polypeptides, agonists, and/or antagonists of the present invention include nerve compression syndromes such as carpal tunnel syndrome, tarsal tunnel syndrome, thoracic outlet syndrome such as cervical rib syndrome, ulnar nerve compression syndrome, neuralgia such as causalgia, cervico-brachial neuralgia, facial neuralgia and trigeminal neuralgia, neuritis such as experimental allergic neuritis, optic neuritis, polyneuritis, polyradiculoneuritis and radiculities such as polyradiculitis, hereditary motor and sensory neuropathies such as Charcot-Marie Disease, Hereditary Optic Atrophy, Refsum's Disease, Hereditary Spastic Paraplegia and Werdnig-Hoffmann Disease, Hereditary Sensory and Autonomic Neuropathies which include Congenital Analgesia and Familial Dysautonomia, POEMS Syndrome, Sciatica, Gustatory Sweating and Tetany).

Endocrine Disorders

[0897] Polynucleotides or polypeptides, or agonists or antagonists of the present invention, may be used to treat, prevent, diagnose, and/or prognose disorders and/or diseases related to hormone imbalance, and/or disorders or diseases of the endocrine system.

[0898] Hormones secreted by the glands of the endocrine system control physical growth, sexual function, metabolism, and other functions. Disorders may be classified in two ways: disturbances in the production of hormones, and the inability of tissues to respond to hormones. The etiology of these hormone imbalance or endocrine system diseases, disorders or conditions may be genetic, somatic, such as cancer and some autoimmune diseases, acquired (e.g., by chemotherapy, injury or toxins), or infectious. Moreover, polynucleotides, polypeptides, antibodies, and/or agonists or antagonists of the present invention can be used as a marker or detector of a particular disease or disorder related to the endocrine system and/or hormone imbalance.

[0899] Endocrine system and/or hormone imbalance and/or diseases encompass disorders of uterine motility including, but not limited to: complications with pregnancy and labor (e.g., pre-term labor, post-term pregnancy, spontaneous abortion, and slow or stopped labor); and disorders and/or diseases of the menstrual cycle (e.g., dysmenorrhea and endometriosis).

[0900] Endocrine system and/or hormone imbalance disorders and/or diseases include disorders and/or diseases of the pancreas, such as, for example, diabetes mellitus, diabetes insipidus, congenital pancreatic agenesis, pheochromocytoma—islet cell tumor syndrome; disorders and/or diseases of the adrenal glands such as, for example, Addison's Disease, corticosteroid deficiency, virilizing disease, hirsutism, Cushing's Syndrome, hyperaldosteronism, pheochromocytoma; disorders and/or diseases of the pituitary gland, such as, for example, hyperpituitarism, hypopituitarism, pituitary dwarfism, pituitary adenoma, panhypopituitarism, acromegaly, gigantism; disorders and/or diseases of the thyroid, including but not limited to, hyperthyroidism, hypothyroidism, Plummer's disease, Graves' disease (toxic diffuse goiter), toxic nodular goiter, thyroiditis (Hashimoto's thyroiditis, subacute granulomatous thyroiditis, and silent lymphocytic thyroiditis), Pendred's syndrome, myxedema, cretinism, thyrotoxicosis, thyroid hormone coupling defect, thymic aplasia, Hurthle cell tumours of the thyroid, thyroid cancer, thyroid carcinoma, Medullary thyroid carcinoma; disorders and/or diseases of the parathyroid, such as, for example, hyperparathyroidism, hypoparathyroidism; disorders and/or diseases of the hypothalamus.

[0901] In addition, endocrine system and/or hormone imbalance disorders and/or diseases may also include disorders and/or diseases of the testes or ovaries, including cancer. Other disorders and/or diseases of the testes or ovaries further include, for example, ovarian cancer, polycystic ovary syndrome, Klinefelter's syndrome, vanishing testes syndrome (bilateral anorchia), congenital absence of Leydig's cells, cryptorchidism, Noonan's syndrome, myotonic dystrophy, capillary haemangioma of the testis (benign), neoplasias of the testis and neo-testis.

[0902] Moreover, endocrine system and/or hormone imbalance disorders and/or diseases may also include disorders and/or diseases such as, for example, polyglandular deficiency syndromes, pheochromocytoma, neuroblastoma, multiple Endocrine neoplasia, and disorders and/or cancers of endocrine tissues.

[0903] In another embodiment, a polypeptide of the invention, or polynucleotides, antibodies, agonists, or antagonists corresponding to that polypeptide, may be used to diagnose, prognose, prevent, and/or treat endocrine diseases and/or disorders associated with the tissue(s) in which the polypeptide of the invention is expressed, including one, two, three, four, five, or more tissues disclosed in Table 1B, column 8 (Tissue Distribution Library Code).

Reproductive System Disorders

[0904] The polynucleotides or polypeptides, or agonists or antagonists of the invention may be used for the diagnosis, treatment, or prevention of diseases and/or disorders of the reproductive system. Reproductive system disorders that can be treated by the compositions of the invention, include, but are not limited to, reproductive system injuries, infections, neoplastic disorders, congenital defects, and diseases or disorders which result in infertility, complications with pregnancy, labor, or parturition, and postpartum difficulties.

[0905] Reproductive system disorders and/or diseases include diseases and/or disorders of the testes, including testicular atrophy, testicular feminization, cryptorchism (unilateral and bilateral), anorchia, ectopic testis, epididymitis and orchitis (typically resulting from infections such as, for example, gonorrhea, mumps, tuberculosis, and syphilis), testicular torsion, vasitis nodosa, germ cell tumors (e.g., seminomas, embryonal cell carcinomas, teratocarcinomas, choriocarcinomas, yolk sac tumors, and teratomas), stromal tumors (e.g., Leydig cell tumors), hydrocele, hematocele, varicocele, spermatocele, inguinal hernia, and disorders of sperm production (e.g., immotile cilia syndrome, aspermia, asthenozoospermia, azoospermia, oligospermia, and teratozoospermia).

[0906] Reproductive system disorders also include disorders of the prostate gland, such as acute non-bacterial prostatitis, chronic non-bacterial prostatitis, acute bacterial prostatitis, chronic bacterial prostatitis, prostatodystonia, prostatosis, granulomatous prostatitis, malacoplakia, benign prostatic hypertrophy or hyperplasia, and prostate neoplastic disorders, including adenocarcinomas, transitional cell carcinomas, ductal carcinomas, and squamous cell carcinomas.

[0907] Additionally, the compositions of the invention may be useful in the diagnosis, treatment, and/or prevention of disorders or diseases of the penis and urethra, including inflammatory disorders, such as balanoposthitis, balanitis xerotica obliterans, phimosis, paraphimosis, syphilis, herpes simplex virus, gonorrhea, non-gonococcal urethritis, chlamydia, mycoplasma, trichomonas, HIV, AIDS, Reiter's syndrome, condyloma acuminatum, condyloma latum, and pearly penile papules; urethral abnormalities, such as hypospadias, epispadias, and phimosis; premalignant lesions, including Erythroplasia of Queyrat, Bowen's disease, Bowenoid paplosis, giant condyloma of Buscke-Lowenstein, and varrucous carcinoma; penile cancers, including squamous cell carcinomas, carcinoma in situ, verrucous carcinoma, and disseminated penile carcinoma; urethral neoplastic disorders, including penile urethral carcinoma, bulbomembranous urethral carcinoma, and prostatic urethral carcinoma; and erectile disorders, such as priapism, Peyronie's disease, erectile dysfunction, and impotence.

[0908] Moreover, diseases and/or disorders of the vas deferens include vasculititis and CBAVD (congenital bilateral absence of the vas deferens); additionally, the polynucleotides, polypeptides, and agonists or antagonists of the present invention may be used in the diagnosis, treatment, and/or prevention of diseases and/or disorders of the seminal vesicles, including hydatid disease, congenital chloride diarrhea, and polycystic kidney disease.

[0909] Other disorders and/or diseases of the male reproductive system include, for example, Klinefelter's syndrome, Young's syndrome, premature ejaculation, diabetes mellitus, cystic fibrosis, Kartagener's syndrome, high fever, multiple sclerosis, and gynecomastia.

[0910] Further, the polynucleotides, polypeptides, and agonists or antagonists of the present invention may be used in the diagnosis, treatment, and/or prevention of diseases and/or disorders of the vagina and vulva, including bacterial vaginosis, candida vaginitis, herpes simplex virus, chancroid, granuloma inguinale, lymphogranuloma venereum, scabies, human papillomavirus, vaginal trauma, vulvar trauma, adenosis, chlamydia vaginitis, gonorrhea, trichomonas vaginitis, condyloma acuminatum, syphilis, molluscum contagiosum, atrophic vaginitis, Paget's disease, lichen sclerosus, lichen planus, vulvodynia, toxic shock syndrome, vaginismus, vulvovaginitis, vulvar vestibulitis, and neoplastic disorders, such as squamous cell hyperplasia, clear cell carcinoma, basal cell carcinoma, melanomas, cancer of Bartholin's gland, and vulvar intraepithelial neoplasia.

[0911] Disorders and/or diseases of the uterus include dysmenorrhea, retroverted uterus, endometriosis, fibroids, adenomyosis, anovulatory bleeding, amenorrhea, Cushing's syndrome, hydatidiform moles, Asherman's syndrome, premature menopause, precocious puberty, uterine polyps, dysfunctional uterine bleeding (e.g., due to aberrant hormonal signals), and neoplastic disorders, such as adenocarcinomas, keiomyosarcomas, and sarcomas. Additionally, the polypeptides, polynucleotides, or agonists or antagonists of the invention may be useful as a marker or detector of, as well as in the diagnosis, treatment, and/or prevention of congenital uterine abnormalities, such as bicornuate uterus, septate uterus, simple unicornuate uterus, unicornuate uterus with a noncavitary rudimentary horn, unicornuate uterus with a non-communicating cavitary rudimentary horn, unicornuate uterus with a communicating cavitary horn, arcuate uterus, uterine didelfus, and T-shaped uterus.

[0912] Ovarian diseases and/or disorders include anovulation, polycystic ovary syndrome (Stein-Leventhal syndrome), ovarian cysts, ovarian hypofunction, ovarian insensitivity to gonadotropins, ovarian overproduction of androgens, right ovarian vein syndrome, amenorrhea, hirutism, and ovarian cancer (including, but not limited to, primary and secondary cancerous growth, Sertoli-Leydig tumors, endometriod carcinoma of the ovary, ovarian papillary serous adenocarcinoma, ovarian mucinous adenocarcinoma, and Ovarian Krukenberg tumors).

[0913] Cervical diseases and/or disorders include cervicitis, chronic cervicitis, mucopurulent cervicitis, cervical dysplasia, cervical polyps, Nabothian cysts, cervical erosion, cervical incompetence, and cervical neoplasms (including, for example, cervical carcinoma, squamous metaplasia, squamous cell carcinoma, adenosquamous cell neoplasia, and columnar cell neoplasia).

[0914] Additionally, diseases and/or disorders of the reproductive system include disorders and/or diseases of pregnancy, including miscarriage and stillbirth, such as early abortion, late abortion, spontaneous abortion, induced abortion, therapeutic abortion, threatened abortion, missed abortion, incomplete abortion, complete abortion, habitual abortion, missed abortion, and septic abortion; ectopic pregnancy, anemia, Rh incompatibility, vaginal bleeding during pregnancy, gestational diabetes, intrauterine growth retardation, polyhydramnios, HELLP syndrome, abruptio placentae, placenta previa, hyperemesis, preeclampsia, eclampsia, herpes gestationis, and urticaria of pregnancy. Additionally, the polynucleotides, polypeptides, and agonists or antagonists of the present invention may be used in the diagnosis, treatment, and/or prevention of diseases that can complicate pregnancy, including heart disease, heart failure, rheumatic heart disease, congenital heart disease, mitral valve prolapse, high blood pressure, anemia, kidney disease, infectious disease (e.g., rubella, cytomegalovirus, toxoplasmosis, infectious hepatitis, chlamydia, HIV, AIDS, and genital herpes), diabetes mellitus, Graves'disease, thyroiditis, hypothyroidism, Hashimoto's thyroiditis, chronic active hepatitis, cirrhosis of the liver, primary biliary cirrhosis, asthma, systemic lupus eryematosis, rheumatoid arthritis, myasthenia gravis, idiopathic thrombocytopenic purpura, appendicitis, ovarian cysts, gallbladder disorders,and obstruction of the intestine.

[0915] Complications associated with labor and parturition include premature rupture of the membranes, pre-term labor, post-term pregnancy, postmaturity, labor that progresses too slowly, fetal distress (e.g., abnormal heart rate (fetal or maternal), breathing problems, and abnormal fetal position), shoulder dystocia, prolapsed umbilical cord, amniotic fluid embolism, and aberrant uterine bleeding.

[0916] Further, diseases and/or disorders of the postdelivery period, including endometritis, myometritis, parametritis, peritonitis, pelvic thrombophlebitis, pulmonary embolism, endotoxemia, pyelonephritis, saphenous thrombophlebitis, mastitis, cystitis, postpartum hemorrhage, and inverted uterus.

[0917] Other disorders and/or diseases of the female reproductive system that may be diagnosed, treated, and/or prevented by the polynucleotides, polypeptides, and agonists or antagonists of the present invention include, for example, Turner's syndrome, pseudohermaphroditism, premenstrual syndrome, pelvic inflammatory disease, pelvic congestion (vascular engorgement), frigidity, anorgasmia, dyspareunia, ruptured fallopian tube, and Mittelschmerz.

Infectious Disease

[0918] Polynucleotides or polypeptides, as well as agonists or antagonists of the present invention can be used to treat or detect infectious agents. For example, by increasing the immune response, particularly increasing the proliferation and differentiation of B and/or T cells, infectious diseases may be treated. The immune response may be increased by either enhancing an existing immune response, or by initiating a new immune response. Alternatively, polynucleotides or polypeptides, as well as agonists or antagonists of the present invention may also directly inhibit the infectious agent, without necessarily eliciting an immune response.

[0919] Viruses are one example of an infectious agent that can cause disease or symptoms that can be treated or detected by a polynucleotide or polypeptide and/or agonist or antagonist of the present invention. Examples of viruses, include, but are not limited to Examples of viruses, include, but are not limited to the following DNA and RNA viruses and viral families: Arbovirus, Adenoviridae, Arenaviridae, Arterivirus, Birnaviridae, Bunyaviridae, Caliciviridae, Circoviridae, Coronaviridae, Dengue, EBV, HIV, Flaviviridae, Hepadnaviridae (Hepatitis), Herpesviridae (such as, Cytomegalovirus, Herpes Simplex, Herpes Zoster), Mononegavirus (e.g., Paramyxoviridae, Morbillivirus, Rhabdoviridae), Orthomyxoviridae (e.g., Influenza A, Influenza B, and parainfluenza), Papiloma virus, Papovaviridae, Parvoviridae, Picornaviridae, Poxviridae (such as Smallpox or Vaccinia), Reoviridae (e.g., Rotavirus), Retroviridae (HTLV-I, HTLV-II, Lentivirus), and Togaviridae (e.g., Rubivirus). Viruses falling within these families can cause a variety of diseases or symptoms, including, but not limited to: arthritis, bronchiollitis, respiratory syncytial virus, encephalitis, eye infections (e.g., conjunctivitis, keratitis), chronic fatigue syndrome, hepatitis (A, B, C, E, Chronic Active, Delta), Japanese B encephalitis, Junin, Chikungunya, Rift Valley fever, yellow fever, meningitis, opportunistic infections (e.g., AIDS), pneumonia, Burkitt's Lymphoma, chickenpox, hemorrhagic fever, Measles, Mumps, Parainfluenza, Rabies, the common cold, Polio, leukemia, Rubella, sexually transmitted diseases, skin diseases (e.g., Kaposi's, warts), and viremia. polynucleotides or polypeptides, or agonists or antagonists of the invention, can be used to treat or detect any of these symptoms or diseases. In specific embodiments, polynucleotides, polypeptides, or agonists or antagonists of the invention are used to treat: meningitis, Dengue, EBV, and/or hepatitis (e.g., hepatitis B). In an additional specific embodiment polynucleotides, polypeptides, or agonists or antagonists of the invention are used to treat patients nonresponsive to one or more other commercially available hepatitis vaccines. In a further specific embodiment polynucleotides, polypeptides, or agonists or antagonists of the invention are used to treat AIDS.

[0920] Similarly, bacterial and fungal agents that can cause disease or symptoms and that can be treated or detected by a polynucleotide or polypeptide and/or agonist or antagonist of the present invention include, but not limited to, the following Gram-Negative and Gram-positive bacteria, bacterial families, and fungi: Actinomyces (e.g., Norcardia), Acinetobacter, Cryptococcus neoformans, Aspergillus, Bacillaceae (e.g., Bacillus anthrasis), Bacteroides (e.g., Bacteroides fragilis), Blastomycosis, Bordetella, Borrelia (e.g., Borrelia burgdorferi), Brucella, Candidia, Campylobacter, Chlamydia, Clostridium (e.g., Clostridium botulinum, Clostridium dificile, Clostridium perfringens, Clostridium tetani), Coccidioides, Corynebacterium (e.g., Corynebacterium diptheriae), Cryptococcus, Dermatocycoses, E. coli (e.g., Enterotoxigenic E. coli and Enterohemorrhagic E. coli), Enterobacter (e.g. Enterobacter aerogenes), Enterobacteriaceae (Klebsiella, Salmonella (e.g., Salmonella typhi, Salmonella enteritidis, Salmonella typhi), Serratia, Yersinia, Shigella), Erysipelothrix, Haemophilus (e.g., Haemophilus influenza type B), Helicobacter, Legionella (e.g., Legionella pneumophila), Leptospira, Listeria (e.g., Listeria monocytogenes), Mycoplasma, Mycobacterium (e.g., Mycobacterium leprae and Mycobacterium tuberculosis), Vibrio (e.g., Vibrio cholerae), Neisseriaceae (e.g., Neisseria gonorrhea, Neisseria meningitidis), Pasteurellacea, Proteus, Pseudomonas (e.g., Pseudomonas aeruginosa), Rickettsiaceae, Spirochetes (e.g., Treponema spp., Leptospira spp., Borrelia spp.), Shigella spp., Staphylococcus (e.g., Staphylococcus aureus), Meningiococcus, Pneumococcus and Streptococcus (e.g., Streptococcus pneumoniae and Groups A, B, and C Streptococci), and Ureaplasmas. These bacterial, parasitic, and fungal families can cause diseases or symptoms, including, but not limited to: antibiotic-resistant infections, bacteremia, endocarditis, septicemia, eye infections (e.g., conjunctivitis), uveitis, tuberculosis, gingivitis, bacterial diarrhea, opportunistic infections (e.g., AIDS related infections), paronychia, prosthesis-related infections, dental caries, Reiter's Disease, respiratory tract infections, such as Whooping Cough or Empyema, sepsis, Lyme Disease, Cat-Scratch Disease, dysentery, paratyphoid fever, food poisoning, Legionella disease, chronic and acute inflammation, erythema, yeast infections, typhoid, pneumonia, gonorrhea, meningitis (e.g., mengitis types A and B), chlamydia, syphillis, diphtheria, leprosy, brucellosis, peptic ulcers, anthrax, spontaneous abortions, birth defects, pneumonia, lung infections, ear infections, deafness, blindness, lethargy, malaise, vomiting, chronic diarrhea, Crohn's disease, colitis, vaginosis, sterility, pelvic inflammatory diseases, candidiasis, paratuberculosis, tuberculosis, lupus, botulism, gangrene, tetanus, impetigo, Rheumatic Fever, Scarlet Fever, sexually transmitted diseases, skin diseases (e.g., cellulitis, dermatocycoses), toxemia, urinary tract infections, wound infections, noscomial infections. Polynucleotides or polypeptides, agonists or antagonists of the invention, can be used to treat or detect any of these symptoms or diseases. In specific embodiments, polynucleotides, polypeptides, agonists or antagonists of the invention are used to treat: tetanus, diptheria, botulism, and/or meningitis type B.

[0921] Moreover, parasitic agents causing disease or symptoms that can be treated, prevented, and/or diagnosed by a polynucleotide or polypeptide and/or agonist or antagonist of the present invention include, but not limited to, the following families or class: Amebiasis, Babesiosis, Coccidiosis, Cryptosporidiosis, Dientamoebiasis, Dourine, Ectoparasitic, Giardias, Helminthiasis, Leishmaniasis, Schistisoma, Theileriasis, Toxoplasmosis, Trypanosomiasis, and Trichomonas and Sporozoans (e.g., Plasmodium virax, Plasmodium falciparium, Plasmodium malariae and Plasmodium ovale). These parasites can cause a variety of diseases or symptoms, including, but not limited to: Scabies, Trombiculiasis, eye infections, intestinal disease (e.g., dysentery, giardiasis), liver disease, lung disease, opportunistic infections (e.g., AIDS related), malaria, pregnancy complications, and toxoplasmosis. polynucleotides or polypeptides, or agonists or antagonists of the invention, can be used to treat, prevent, and/or diagnose any of these symptoms or diseases. In specific embodiments, polynucleotides, polypeptides, or agonists or antagonists of the invention are used to treat, prevent, and/or diagnose malaria.

[0922] Polynucleotides or polypeptides, as well as agonists or antagonists of the present invention of the present invention could either be by administering an effective amount of a polypeptide to the patient, or by removing cells from the patient, supplying the cells with a polynucleotide of the present invention, and returning the engineered cells to the patient (ex vivo therapy). Moreover, the polypeptide or polynucleotide of the present invention can be used as an antigen in a vaccine to raise an immune response against infectious disease.

Regeneration

[0923] Polynucleotides or polypeptides, as well as agonists or antagonists of the present invention can be used to differentiate, proliferate, and attract cells, leading to the regeneration of tissues. (See, Science 276:59-87 (1997)). The regeneration of tissues could be used to repair, replace, or protect tissue damaged by congenital defects, trauma (wounds, burns, incisions, or ulcers), age, disease (e.g. osteoporosis, osteocarthritis, periodontal disease, liver failure), surgery, including cosmetic plastic surgery, fibrosis, reperfusion injury, or systemic cytokine damage.

[0924] Tissues that could be regenerated using the present invention include organs (e.g., pancreas, liver, intestine, kidney, skin, endothelium), muscle (smooth, skeletal or cardiac), vasculature (including vascular and lymphatics), nervous, hematopoietic, and skeletal (bone, cartilage, tendon, and ligament) tissue. Preferably, regeneration occurs without or decreased scarring. Regeneration also may include angiogenesis.

[0925] Moreover, polynucleotides or polypeptides, as well as agonists or antagonists of the present invention, may increase regeneration of tissues difficult to heal. For example, increased tendon/ligament regeneration would quicken recovery time after damage. Polynucleotides or polypeptides, as well as agonists or antagonists of the present invention could also be used prophylactically in an effort to avoid damage. Specific diseases that could be treated include of tendinitis, carpal tunnel syndrome, and other tendon or ligament defects. A further example of tissue regeneration of non-healing wounds includes pressure ulcers, ulcers associated with vascular insufficiency, surgical, and traumatic wounds.

[0926] Similarly, nerve and brain tissue could also be regenerated by using polynucleotides or polypeptides, as well as agonists or antagonists of the present invention, to proliferate and differentiate nerve cells. Diseases that could be treated using this method include central and peripheral nervous system diseases, neuropathies, or mechanical and traumatic disorders (e.g., spinal cord disorders, head trauma, cerebrovascular disease, and stoke). Specifically, diseases associated with peripheral nerve injuries, peripheral neuropathy (e.g., resulting from chemotherapy or other medical therapies), localized neuropathies, and central nervous system diseases (e.g., Alzheimer's disease, Parkinson's disease, Huntington's disease, amyotrophic lateral sclerosis, and Shy-Drager syndrome), could all be treated using the polynucleotides or polypeptides, as well as agonists or antagonists of the present invention.

Gastrointestinal Disorders

[0927] Polynucleotides or polypeptides, or agonists or antagonists of the present invention, may be used to treat, prevent, diagnose, and/or prognose gastrointestinal disorders, including inflammatory diseases and/or conditions, infections, cancers (e.g., intestinal neoplasms (carcinoid tumor of the small intestine, non-Hodgkin's lymphoma of the small intestine, small bowl lymphoma)), and ulcers, such as peptic ulcers.

[0928] Gastrointestinal disorders include dysphagia, odynophagia, inflammation of the esophagus, peptic esophagitis, gastric reflux, submucosal fibrosis and stricturing, Mallory-Weiss lesions, leiomyomas, lipomas, epidermal cancers, adeoncarcinomas, gastric retention disorders, gastroenteritis, gastric atrophy, gastric/stomach cancers, polyps of the stomach, autoimmune disorders such as pernicious anemia, pyloric stenosis, gastritis (bacterial, viral, eosinophilic, stress-induced, chronic erosive, atrophic, plasma cell, and Ménétrier's), and peritoneal diseases (e.g., chyloperioneum, hemoperitoneum, mesenteric cyst, mesenteric lymphadenitis, mesenteric vascular occlusion, panniculitis, neoplasms, peritonitis, pneumoperitoneum, bubphrenic abscess,).

[0929] Gastrointestinal disorders also include disorders associated with the small intestine, such as malabsorption syndromes, distension, irritable bowel syndrome, sugar intolerance, celiac disease, duodenal ulcers, duodenitis, tropical sprue, Whipple's disease, intestinal lymphangiectasia, Crohn's disease, appendicitis, obstructions of the ileum, Meckel's diverticulum, multiple diverticula, failure of complete rotation of the small and large intestine, lymphoma, and bacterial and parasitic diseases (such as Traveler's diarrhea, typhoid and paratyphoid, cholera, infection by Roundworms (Ascariasis lumbricoides), Hookworms (Ancylostoma duodenale), Threadworms (Enterobius vermicularis), Tapeworms (Taenia saginata, Echinococcus granulosus, Diphyllobothrium spp., and T. solium).

[0930] Liver diseases and/or disorders include intrahepatic cholestasis (alagille syndrome, biliary liver cirrhosis), fatty liver (alcoholic fatty liver, reye syndrome), hepatic vein thrombosis, hepatolentricular degeneration, hepatomegaly, hepatopulmonary syndrome, hepatorenal syndrome, portal hypertension (esophageal and gastric varices), liver abscess (amebic liver abscess), liver cirrhosis (alcoholic, biliary and experimental), alcoholic liver diseases (fatty liver, hepatitis, cirrhosis), parasitic (hepatic echinococcosis, fascioliasis, amebic liver abscess), jaundice (hemolytic, hepatocellular, and cholestatic), cholestasis, portal hypertension, liver enlargement, ascites, hepatitis (alcoholic hepatitis, animal hepatitis, chronic hepatitis (autoimmune, hepatitis B, hepatitis C, hepatitis D, drug induced), toxic hepatitis, viral human hepatitis (hepatitis A, hepatitis B, hepatitis C, hepatitis D, hepatitis E), Wilson's disease, granulomatous hepatitis, secondary biliary cirrhosis, hepatic encephalopathy, portal hypertension, varices, hepatic encephalopathy, primary biliary cirrhosis, primary sclerosing cholangitis, hepatocellular adenoma, hemangiomas, bile stones, liver failure (hepatic encephalopathy, acute liver failure), and liver neoplasms (angiomyolipoma, calcified liver metastases, cystic liver metastases, epithelial tumors, fibrolamellar hepatocarcinoma, focal nodular hyperplasia, hepatic adenoma, hepatobiliary cystadenoma, hepatoblastoma, hepatocellular carcinoma, hepatoma, liver cancer, liver hemangioendothelioma, mesenchymal hamartoma, mesenchymal tumors of liver, nodular regenerative hyperplasia, benign liver tumors (Hepatic cysts [Simple cysts, Polycystic liver disease, Hepatobiliary cystadenoma, Choledochal cyst], Mesenchymal tumors [Mesenchymal hamartoma, Infantile hemangioendothelioma, Hemangioma, Peliosis hepatis, Lipomas, Inflammatory pseudotumor, Miscellaneous], Epithelial tumors [Bile duct epithelium (Bile duct hamartoma, Bile duct adenoma), Hepatocyte (Adenoma, Focal nodular hyperplasia, Nodular regenerative hyperplasia)], malignant liver tumors [hepatocellular, hepatoblastoma, hepatocellular carcinoma, cholangiocellular, cholangiocarcinoma, cystadenocarcinoma, tumors of blood vessels, angiosarcoma, Karposi's sarcoma, hemangioendothelioma, other tumors, embryonal sarcoma, fibrosarcoma, leiomyosarcoma, rhabdomyosarcoma, carcinosarcoma, teratoma, carcinoid, squamous carcinoma, primary lymphoma]), peliosis hepatis, erythrohepatic porphyria, hepatic porphyria (acute intermittent porphyria, porphyria cutanea tarda), Zellweger syndrome).

[0931] Pancreatic diseases and/or disorders include acute pancreatitis, chronic pancreatitis (acute necrotizing pancreatitis, alcoholic pancreatitis), neoplasms (adenocarcinoma of the pancreas, cystadenocarcinoma, insulinoma, gastrinoma, and glucagonoma, cystic neoplasms, islet-cell tumors, pancreoblastoma), and other pancreatic diseases (e.g., cystic fibrosis, cyst (pancreatic pseudocyst, pancreatic fistula, insufficiency)).

[0932] Gallbladder diseases include gallstones (cholelithiasis and choledocholithiasis), postcholecystectomy syndrome, diverticulosis of the gallbladder, acute cholecystitis, chronic cholecystitis, bile duct tumors, and mucocele.

[0933] Diseases and/or disorders of the large intestine include antibiotic-associated colitis, diverticulitis, ulcerative colitis, acquired megacolon, abscesses, fungal and bacterial infections, anorectal disorders (e.g., fissures, hemorrhoids), colonic diseases (colitis, colonic neoplasms [colon cancer, adenomatous colon polyps (e.g., villous adenoma), colon carcinoma, colorectal cancer], colonic diverticulitis, colonic diverticulosis, megacolon [Hirschsprung disease, toxic megacolon]; sigmoid diseases [proctocolitis, sigmoin neoplasms]), constipation, Crohn's disease, diarrhea (infantile diarrhea, dysentery), duodenal diseases (duodenal neoplasms, duodenal obstruction, duodenal ulcer, duodenitis), enteritis (enterocolitis), HIV enteropathy, ileal diseases (ileal neoplasms, ileitis), immunoproliferative small intestinal disease, inflammatory bowel disease (ulcerative colitis, Crohn's disease), intestinal atresia, parasitic diseases (anisakiasis, balantidiasis, blastocystis infections, cryptosporidiosis, dientamoebiasis, amebic dysentery, giardiasis), intestinal fistula (rectal fistula), intestinal neoplasms (cecal neoplasms, colonic neoplasms, duodenal neoplasms, ileal neoplasms, intestinal polyps, jejunal neoplasms, rectal neoplasms), intestinal obstruction (afferent loop syndrome, duodenal obstruction, impacted feces, intestinal pseudo-obstruction [cecal volvulus], intussusception), intestinal perforation, intestinal polyps (colonic polyps, gardner syndrome, peutz-jeghers syndrome), jejunal diseases (jejunal neoplasms), malabsorption syndromes (blind loop syndrome, celiac disease, lactose intolerance, short bowl syndrome, tropical sprue, whipple's disease), mesenteric vascular occlusion, pneumatosis cystoides intestinalis, protein-losing enteropathies (intestinal lymphagiectasis), rectal diseases (anus diseases, fecal incontinence, hemorrhoids, proctitis, rectal fistula, rectal prolapse, rectocele), peptic ulcer (duodenal ulcer, peptic esophagitis, hemorrhage, perforation, stomach ulcer, Zollinger-Ellison syndrome), postgastrectomy syndromes (dumping syndrome), stomach diseases (e.g., achlorhydria, duodenogastric reflux (bile reflux), gastric antral vascular ectasia, gastric fistula, gastric outlet obstruction, gastritis (atrophic or hypertrophic), gastroparesis, stomach dilatation, stomach diverticulum, stomach neoplasms (gastric cancer, gastric polyps, gastric adenocarcinoma, hyperplastic gastric polyp), stomach rupture, stomach ulcer, stomach volvulus), tuberculosis, visceroptosis, vomiting (e.g., hematemesis, hyperemesis gravidarum, postoperative nausea and vomiting) and hemorrhagic colitis.

[0934] Further diseases and/or disorders of the gastrointestinal system include biliary tract diseases, such as, gastroschisis, fistula (e.g., biliary fistula, esophageal fistula, gastric fistula, intestinal fistula, pancreatic fistula), neoplasms (e.g., biliary tract neoplasms, esophageal neoplasms, such as adenocarcinoma of the esophagus, esophageal squamous cell carcinoma, gastrointestinal neoplasms, pancreatic neoplasms, such as adenocarcinoma of the pancreas, mucinous cystic neoplasm of the pancreas, pancreatic cystic neoplasms, pancreatoblastoma, and peritoneal neoplasms), esophageal disease (e.g., bullous diseases, candidiasis, glycogenic acanthosis, ulceration, barrett esophagus varices, atresia, cyst, diverticulum (e.g., Zenker's diverticulum), fistula (e.g., tracheoesophageal fistula), motility disorders (e.g., CREST syndrome, deglutition disorders, achalasia, spasm, gastroesophageal reflux), neoplasms, perforation (e.g., Boerhaave syndrome, Mallory-Weiss syndrome), stenosis, esophagitis, diaphragmatic hernia (e.g., hiatal hernia); gastrointestinal diseases, such as, gastroenteritis (e.g., cholera morbus, norwalk virus infection), hemorrhage (e.g., hematemesis, melena, peptic ulcer hemorrhage), stomach neoplasms (gastric cancer, gastric polyps, gastric adenocarcinoma, stomach cancer)), hernia (e.g., congenital diaphragmatic hernia, femoral hernia, inguinal hernia, obturator hernia, umbilical hernia, ventral hernia), and intestinal diseases (e.g., cecal diseases (appendicitis, cecal neoplasms)).

Chemotaxis

[0935] Polynucleotides or polypeptides, as well as agonists or antagonists of the present invention may have chemotaxis activity. A chemotaxic molecule attracts or mobilizes cells (e.g., monocytes, fibroblasts, neutrophils, T-cells, mast cells, eosinophils, epithelial and/or endothelial cells) to a particular site in the body, such as inflammation, infection, or site of hyperproliferation. The mobilized cells can then fight off and/or heal the particular trauma or abnormality.

[0936] Polynucleotides or polypeptides, as well as agonists or antagonists of the present invention may increase chemotaxic activity of particular cells. These chemotactic molecules can then be used to treat inflammation, infection, hyperproliferative disorders, or any immune system disorder by increasing the number of cells targeted to a particular location in the body. For example, chemotaxic molecules can be used to treat wounds and other trauma to tissues by attracting immune cells to the injured location. Chemotactic molecules of the present invention can also attract fibroblasts, which can be used to treat wounds.

[0937] It is also contemplated that polynucleotides or polypeptides, as well as agonists or antagonists of the present invention may inhibit chemotactic activity. These molecules could also be used to treat disorders. Thus, polynucleotides or polypeptides, as well as agonists or antagonists of the present invention could be used as an inhibitor of chemotaxis.

Binding Activity

[0938] A polypeptide of the present invention may be used to screen for molecules that bind to the polypeptide or for molecules to which the polypeptide binds. The binding of the polypeptide and the molecule may activate (agonist), increase, inhibit (antagonist), or decrease activity of the polypeptide or the molecule bound. Examples of such molecules include antibodies, oligonucleotides, proteins (e.g., receptors),or small molecules.

[0939] Preferably, the molecule is closely related to the natural ligand of the polypeptide, e.g., a fragment of the ligand, or a natural substrate, a ligand, a structural or functional mimetic. (See, Coligan et al., Current Protocols in Immunology 1(2):Chapter 5 (1991)). Similarly, the molecule can be closely related to the natural receptor to which the polypeptide binds, or at least, a fragment of the receptor capable of being bound by the polypeptide (e.g., active site). In either case, the molecule can be rationally designed using known techniques.

[0940] Preferably, the screening for these molecules involves producing appropriate cells which express the polypeptide. Preferred cells include cells from mammals, yeast, Drosophila, or E. coli. Cells expressing the polypeptide (or cell membrane containing the expressed polypeptide) are then preferably contacted with a test compound potentially containing the molecule to observe binding, stimulation, or inhibition of activity of either the polypeptide or the molecule.

[0941] The assay may simply test binding of a candidate compound to the polypeptide, wherein binding is detected by a label, or in an assay involving competition with a labeled competitor. Further, the assay may test whether the candidate compound results in a signal generated by binding to the polypeptide.

[0942] Alternatively, the assay can be carried out using cell-free preparations, polypeptide/molecule affixed to a solid support, chemical libraries, or natural product mixtures. The assay may also simply comprise the steps of mixing a candidate compound with a solution containing a polypeptide, measuring polypeptide/molecule activity or binding, and comparing the polypeptide/molecule activity or binding to a standard.

[0943] Preferably, an ELISA assay can measure polypeptide level or activity in a sample (e.g., biological sample) using a monoclonal or polyclonal antibody. The antibody can measure polypeptide level or activity by either binding, directly or indirectly, to the polypeptide or by competing with the polypeptide for a substrate.

[0944] Additionally, the receptor to which the polypeptide of the present invention binds can be identified by numerous methods known to those of skill in the art, for example, ligand panning and FACS sorting (Coligan, et al., Current Protocols in Immun., 1(2), Chapter 5, (1991)). For example, expression cloning is employed wherein polyadenylated RNA is prepared from a cell responsive to the polypeptides, for example, NIH3T3 cells which are known to contain multiple receptors for the FGF family proteins, and SC-3 cells, and a cDNA library created from this RNA is divided into pools and used to transfect COS cells or other cells that are not responsive to the polypeptides. Transfected cells which are grown on glass slides are exposed to the polypeptide of the present invention, after they have been labeled. The polypeptides can be labeled by a variety of means including iodination or inclusion of a recognition site for a site-specific protein kinase.

[0945] Following fixation and incubation, the slides are subjected to auto-radiographic analysis. Positive pools are identified and sub-pools are prepared and re-transfected using an iterative sub-pooling and re-screening process, eventually yielding a single clones that encodes the putative receptor.

[0946] As an alternative approach for receptor identification, the labeled polypeptides can be photoaffinity linked with cell membrane or extract preparations that express the receptor molecule. Cross-linked material is resolved by PAGE analysis and exposed to X-ray film. The labeled complex containing the receptors of the polypeptides can be excised, resolved into peptide fragments, and subjected to protein microsequencing. The amino acid sequence obtained from microsequencing would be used to design a set of degenerate oligonucleotide probes to screen a cDNA library to identify the genes encoding the putative receptors.

[0947] Moreover, the techniques of gene-shuffling, motif-shuffling, exon-shuffling, and/or codon-shuffling (collectively referred to as “DNA shuffling”) may be employed to modulate the activities of the polypeptide of the present invention thereby effectively generating agonists and antagonists of the polypeptide of the present invention. See generally, U.S. Pat. Nos. 5,605,793, 5,811,238, 5,830,721, 5,834,252, and 5,837,458, and Patten, P. A., et al., Curr. Opinion Biotechnol. 8:724-33 (1997); Harayama, S. Trends Biotechnol. 16(2):76-82 (1998); Hansson, L. O., et al., J. Mol. Biol. 287:265-76 (1999); and Lorenzo, M. M. and Blasco, R. Biotechniques 24(2):308-13 (1998); each of these patents and publications are hereby incorporated by reference). In one embodiment, alteration of polynucleotides and corresponding polypeptides may be achieved by DNA shuffling. DNA shuffling involves the assembly of two or more DNA segments into a desired molecule by homologous, or site-specific, recombination. In another embodiment, polynucleotides and corresponding polypeptides may be altered by being subjected to random mutagenesis by error-prone PCR, random nucleotide insertion or other methods prior to recombination. In another embodiment, one or more components, motifs, sections, parts, domains, fragments, etc., of the polypeptide of the present invention may be recombined with one or more components, motifs, sections, parts, domains, fragments, etc. of one or more heterologous molecules. In preferred embodiments, the heterologous molecules are family members. In further preferred embodiments, the heterologous molecule is a growth factor such as, for example, platelet-derived growth factor (PDGF), insulin-like growth factor (IGF-I), transforming growth factor (TGF)-alpha, epidermal growth factor (EGF), fibroblast growth factor (FGF), TGF-beta, bone morphogenetic protein (BMP)-2, BMP-4, BMP-5, BMP-6, BMP-7, activins A and B, decapentaplegic(dpp), 60A, OP-2, dorsalin, growth differentiation factors (GDFs), nodal, MIS, inhibin-alpha, TGF-beta1, TGF-beta2, TGF-beta3, TGF-beta5, and glial-derived neurotrophic factor (GDNF).

[0948] Other preferred fragments are biologically active fragments of the polypeptide of the present invention. Biologically active fragments are those exhibiting activity similar, but not necessarily identical, to an activity of the polypeptide of the present invention. The biological activity of the fragments may include an improved desired activity, or a decreased undesirable activity.

[0949] Additionally, this invention provides a method of screening compounds to identify those which modulate the action of the polypeptide of the present invention. An example of such an assay comprises combining a mammalian fibroblast cell, a the polypeptide of the present invention, the compound to be screened and ³[H] thymidine under cell culture conditions where the fibroblast cell would normally proliferate. A control assay may be performed in the absence of the compound to be screened and compared to the amount of fibroblast proliferation in the presence of the compound to determine if the compound stimulates proliferation by determining the uptake of ³[H] thymidine in each case. The amount of fibroblast cell proliferation is measured by liquid scintillation chromatography which measures the incorporation of ³[H] thymidine: Both agonist and antagonist compounds may be identified by this procedure.

[0950] In another method, a mammalian cell or membrane preparation expressing a receptor for a polypeptide of the present invention is incubated with a labeled polypeptide of the present invention in the presence of the compound. The ability of the compound to enhance or block this interaction could then be measured. Alternatively, the response of a known second messenger system following interaction of a compound to be screened and the receptor is measured and the ability of the compound to bind to the receptor and elicit a second messenger response is measured to determine if the compound is a potential agonist or antagonist. Such second messenger systems include but are not limited to, cAMP guanylate cyclase, ion channels or phosphoinositide hydrolysis.

[0951] All of these above assays can be used as diagnostic or prognostic markers. The molecules discovered using these assays can be used to treat disease or to bring about a particular result in a patient (e.g., blood vessel growth) by activating or inhibiting the polypeptide/molecule. Moreover, the assays can discover agents which may inhibit or enhance the production of the polypeptides of the invention from suitably manipulated cells or tissues.

[0952] Therefore, the invention includes a method of identifying compounds which bind to a polypeptide of the invention comprising the steps of: (a) incubating a candidate binding compound with a polypeptide of the present invention; and (b) determining if binding has occurred. Moreover, the invention includes a method of identifying agonists/antagonists comprising the steps of: (a) incubating a candidate compound with a polypeptide of the present invention, (b) assaying a biological activity, and (b) determining if a biological activity of the polypeptide has been altered.

Targeted Delivery

[0953] In another embodiment, the invention provides a method of delivering compositions to targeted cells expressing a receptor for a polypeptide of the invention, or cells expressing a cell bound form of a polypeptide of the invention.

[0954] As discussed herein, polypeptides or antibodies of the invention may be associated with heterologous polypeptides, heterologous nucleic acids, toxins, or prodrugs via hydrophobic, hydrophilic, ionic and/or covalent interactions. In one embodiment, the invention provides a method for the specific delivery of compositions of the invention to cells by administering polypeptides of the invention (including antibodies) that are associated with heterologous polypeptides or nucleic acids. In one example, the invention provides a method for delivering a therapeutic protein into the targeted cell. In another example, the invention provides a method for delivering a single stranded nucleic acid (e.g., antisense or ribozymes) or double stranded nucleic acid (e.g., DNA that can integrate into the cell's genome or replicate episomally and that can be transcribed) into the targeted cell.

[0955] In another embodiment, the invention provides a method for the specific destruction of cells (e.g., the destruction of tumor cells) by administering polypeptides of the invention (e.g., polypeptides of the invention or antibodies of the invention) in association with toxins or cytotoxic prodrugs.

[0956] By “toxin” is meant compounds that bind and activate endogenous cytotoxic effector systems, radioisotopes, holotoxins, modified toxins, catalytic subunits of toxins, or any molecules or enzymes not normally present in or on the surface of a cell that under defined conditions cause the cell's death. Toxins that may be used according to the methods of the invention include, but are not limited to, radioisotopes known in the art, compounds such as, for example, antibodies (or complement fixing containing portions thereof) that bind an inherent or induced endogenous cytotoxic effector system, thymidine kinase, endonuclease, RNAse, alpha toxin, ricin, abrin, Pseudomonas exotoxin A, diphtheria toxin, saporin, momordin, gelonin, pokeweed antiviral protein, alpha-sarcin and cholera toxin. By “cytotoxic prodrug” is meant a non-toxic compound that is converted by an enzyme, normally present in the cell, into a cytotoxic compound. Cytotoxic prodrugs that may be used according to the methods of the invention include, but are not limited to, glutamyl derivatives of benzoic acid mustard alkylating agent, phosphate derivatives of etoposide or mitomycin C, cytosine arabinoside, daunorubisin, and phenoxyacetamide derivatives of doxorubicin.

Drug Screening

[0957] Further contemplated is the use of the polypeptides of the present invention, or the polynucleotides encoding these polypeptides, to screen for molecules which modify the activities of the polypeptides of the present invention. Such a method would include contacting the polypeptide of the present invention with a selected compound(s) suspected of having antagonist or agonist activity, and assaying the activity of these polypeptides following binding.

[0958] This invention is particularly useful for screening therapeutic compounds by using the polypeptides of the present invention, or binding fragments thereof, in any of a variety of drug screening techniques. The polypeptide or fragment employed in such a test may be affixed to a solid support, expressed on a cell surface, free in solution, or located intracellularly. One method of drug screening utilizes eukaryotic or prokaryotic host cells which are stably transformed with recombinant nucleic acids expressing the polypeptide or fragment. Drugs are screened against such transformed cells in competitive binding assays. One may measure, for example, the formulation of complexes between the agent being tested and a polypeptide of the present invention.

[0959] Thus, the present invention provides methods of screening for drugs or any other agents which affect activities mediated by the polypeptides of the present invention. These methods comprise contacting such an agent with a polypeptide of the present invention or a fragment thereof and assaying for the presence of a complex between the agent and the polypeptide or a fragment thereof, by methods well known in the art. In such a competitive binding assay, the agents to screen are typically labeled. Following incubation, free agent is separated from that present in bound form, and the amount of free or uncomplexed label is a measure of the ability of a particular agent to bind to the polypeptides of the present invention.

[0960] Another technique for drug screening provides high throughput screening for compounds having suitable binding affinity to the polypeptides of the present invention, and is described in great detail in European Patent Application 84/03564, published on Sep. 13, 1984, which is incorporated herein by reference herein. Briefly stated, large numbers of different small peptide test compounds are synthesized on a solid substrate, such as plastic pins or some other surface. The peptide test compounds are reacted with polypeptides of the present invention and washed. Bound polypeptides are then detected by methods well known in the art. Purified polypeptides are coated directly onto plates for use in the aforementioned drug screening techniques. In addition, non-neutralizing antibodies may be used to capture the peptide and immobilize it on the solid support.

[0961] This invention also contemplates the use of competitive drug screening assays in which neutralizing antibodies capable of binding polypeptides of the present invention specifically compete with a test compound for binding to the polypeptides or fragments thereof. In this manner, the antibodies are used to detect the presence of any peptide which shares one or more antigenic epitopes with a polypeptide of the invention.

Antisense and Ribozyme (Antagonists)

[0962] In specific embodiments, antagonists according to the present invention are nucleic acids corresponding to the sequences contained in SEQ ID NO:X, or the complementary strand thereof, and/or to cDNA sequences contained in cDNA ATCC Deposit No:Z identified for example, in Table 1A and/or 1B. In one embodiment, antisense sequence is generated internally, by the organism, in another embodiment, the antisense sequence is separately administered (see, for example, O'Connor, J., Neurochem. 56:560 (1991). Oligodeoxynucleotides as Antisense Inhibitors of Gene Expression, CRC Press, Boca Raton, Fla. (1988). Antisense technology can be used to control gene expression through antisense DNA or RNA, or through triple-helix formation. Antisense techniques are discussed for example, in Okano, J., Neurochem. 56:560 (1991); Oligodeoxynucleotides as Antisense Inhibitors of Gene Expression, CRC Press, Boca Raton, Fla. (1988). Triple helix formation is discussed in, for instance, Lee et al., Nucleic Acids Research 6:3073 (1979); Cooney et al., Science 241:456 (1988); and Dervan et al., Science 251:1300 (1991). The methods are based on binding of a polynucleotide to a complementary DNA or RNA.

[0963] For example, the use of c-myc and c-myb antisense RNA constructs to inhibit the growth of the non-lymphocytic leukemia cell line HL-60 and other cell lines was previously described. (Wickstrom et al. (1988); Anfossi et al. (1989)). These experiments were performed in vitro by incubating cells with the oligoribonucleotide. A similar procedure for in vivo use is described in WO 91/15580. Briefly, a pair of oligonucleotides for a given antisense RNA is produced as follows: A sequence complimentary to the first 15 bases of the open reading frame is flanked by an EcoR1 site on the 5 end and a HindIII site on the 3 end. Next, the pair of oligonucleotides is heated at 90° C. for one minute and then annealed in 2× ligation buffer (20 mM TRIS HCl pH 7.5, 10 mM MgCl2, 10 MM dithiothreitol (DTT) and 0.2 mM ATP) and then ligated to the EcoR1/Hind III site of the retroviral vector PMV7 (WO 91/15580).

[0964] For example, the 5′ coding portion of a polynucleotide that encodes the polypeptide of the present invention may be used to design an antisense RNA oligonucleotide of from about 10 to 40 base pairs in length. A DNA oligonucleotide is designed to be complementary to a region of the gene involved in transcription thereby preventing transcription and the production of the receptor. The antisense RNA oligonucleotide hybridizes to the mRNA in vivo and blocks translation of the mRNA molecule into receptor polypeptide.

[0965] In one embodiment, the antisense nucleic acid of the invention is produced intracellularly by transcription from an exogenous sequence. For example, a vector or a portion thereof, is transcribed, producing an antisense nucleic acid (RNA) of the invention. Such a vector would contain a sequence encoding the antisense nucleic acid. Such a vector can remain episomal or become chromosomally integrated, as long as it can be transcribed to produce the desired antisense RNA. Such vectors can be constructed by recombinant DNA technology methods standard in the art. Vectors can be plasmid, viral, or others known in the art, used for replication and expression in vertebrate cells. Expression of the sequence encoding the polypeptide of the present invention or fragments thereof, can be by any promoter known in the art to act in vertebrate, preferably human cells. Such promoters can be inducible or constitutive. Such promoters include, but are not limited to, the SV40 early promoter region (Bernoist and Chambon, Nature 29:304-310 (1981), the promoter contained in the 3′ long terminal repeat of Rous sarcoma virus (Yamamoto et al., Cell 22:787-797 (1980), the herpes thymidine promoter (Wagner et al., Proc. Natl. Acad. Sci. U.S.A. 78:1441-1445 (1981), the regulatory sequences of the metallothionein gene (Brinster, et al., Nature 296:39-42 (1982)), etc.

[0966] The antisense nucleic acids of the invention comprise a sequence complementary to at least a portion of an RNA transcript of a gene of the present invention. However, absolute complementarity, although preferred, is not required. A sequence “complementary to at least a portion of an RNA,” referred to herein, means a sequence having sufficient complementarity to be able to hybridize with the RNA, forming a stable duplex; in the case of double stranded antisense nucleic acids, a single strand of the duplex DNA may thus be tested, or triplex formation may be assayed. The ability to hybridize will depend on both the degree of complementarity and the length of the antisense nucleic acid. Generally, the larger the hybridizing nucleic acid, the more base mismatches with a RNA it may contain and still form a stable duplex (or triplex as the case may be). One skilled in the art can ascertain a tolerable degree of mismatch by use of standard procedures to determine the melting point of the hybridized complex.

[0967] Oligonucleotides that are complementary to the 5′ end of the message, e.g., the 5′ untranslated sequence up to and including the AUG initiation codon, should work most efficiently at inhibiting translation. However, sequences complementary to the 3′ untranslated sequences of mRNAs have been shown to be effective at inhibiting translation of mRNAs as well. See generally, Wagner, R., 1994, Nature 372:333-335. Thus, oligonucleotides complementary to either the 5′- or 3′-non-translated, non-coding regions of polynucleotide sequences described herein could be used in an antisense approach to inhibit translation of endogenous mRNA. Oligonucleotides complementary to the 5′ untranslated region of the mRNA should include the complement of the AUG start codon. Antisense oligonucleotides complementary to mRNA coding regions are less efficient inhibitors of translation but could be used in accordance with the invention. Whether designed to hybridize to the 5′-, 3′- or coding region of mRNA of the present invention, antisense nucleic acids should be at least six nucleotides in length, and are preferably oligonucleotides ranging from 6 to about 50 nucleotides in length. In specific aspects the oligonucleotide is at least 10 nucleotides, at least 17 nucleotides, at least 25 nucleotides or at least 50 nucleotides.

[0968] The polynucleotides of the invention can be DNA or RNA or chimeric mixtures or derivatives or modified versions thereof, single-stranded or double-stranded. The oligonucleotide can be modified at the base moiety, sugar moiety, or phosphate backbone, for example, to improve stability of the molecule, hybridization, etc. The oligonucleotide may include other appended groups such as peptides (e.g., for targeting host cell receptors in vivo), or agents facilitating transport across the cell membrane (see, e.g., Letsinger et al., 1989, Proc. Natl. Acad. Sci. U.S.A. 86:6553-6556; Lemaitre et al., 1987, Proc. Natl. Acad. Sci. 84:648-652; PCT Publication No. WO88/09810, published Dec. 15, 1988) or the blood-brain barrier (see, e.g., PCT Publication No. WO89/10134, published Apr. 25, 1988), hybridization-triggered cleavage agents. (See, e.g., Krol et al., 1988, BioTechniques 6:958-976) or intercalating agents. (See, e.g., Zon, 1988, Pharm. Res. 5:539-549). To this end, the oligonucleotide may be conjugated to another molecule, e.g., a peptide, hybridization triggered cross-linking agent, transport agent, hybridization-triggered cleavage agent, etc.

[0969] The antisense oligonucleotide may comprise at least one modified base moiety which is selected from the group including, but not limited to, 5-fluorouracil, 5-bromouracil, 5-chlorouracil, 5-iodouracil, hypoxanthine, xantine, 4-acetylcytosine, 5-(carboxyhydroxylmethyl) uracil, 5-carboxymethylaminomethyl-2-thiouridine, 5-carboxymethylaminomethyluracil, dihydrouracil, beta-D-galactosylqueosine, inosine, N6-isopentenyladenine, 1-methylguanine, 1-methylinosine, 2,2-dimethylguanine, 2-methyladenine, 2-methylguanine, 3-methylcytosine, 5-methylcytosine, N6-adenine, 7-methylguanine, 5-methylaminomethyluracil, 5-methoxyaminomethyl-2-thiouracil, beta-D-mannosylqueosine, 5′-methoxycarboxymethyluracil, 5-methoxyuracil, 2-methylthio-N6-isopentenyladenine, uracil-5-oxyacetic acid (v), wybutoxosine, pseudouracil, queosine, 2-thiocytosine, 5-methyl-2-thiouracil, 2-thiouracil, 4-thiouracil, 5-methyluracil, uracil-5-oxyacetic acid methylester, uracil-5-oxyacetic acid (v), 5-methyl-2-thiouracil, 3-(3-amino-3-N-2-carboxypropyl) uracil, (acp3)w, and 2,6-diaminopurine.

[0970] The antisense oligonucleotide may also comprise at least one modified sugar moiety selected from the group including, but not limited to, arabinose, 2-fluoroarabinose, xylulose, and hexose.

[0971] In yet another embodiment, the antisense oligonucleotide comprises at least one modified phosphate backbone selected from the group including, but not limited to, a phosphorothioate, a phosphorodithioate, a phosphoramidothioate, a phosphoramidate, a phosphordiamidate, a methylphosphonate, an alkyl phosphotriester, and a formacetal or analog thereof.

[0972] In yet another embodiment, the antisense oligonucleotide is an a-anomeric oligonucleotide. An a-anomeric oligonucleotide forms specific double-stranded hybrids with complementary RNA in which, contrary to the usual b-units, the strands run parallel to each other (Gautier et al., 1987, Nucl. Acids Res. 15:6625-6641). The oligonucleotide is a 2′-0-methylribonucleotide (Inoue et al., 1987, Nucl. Acids Res. 15:6131-6148), or a chimeric RNA-DNA analogue (Inoue et al., 1987, FEBS Lett. 215:327-330).

[0973] Polynucleotides of the invention may be synthesized by standard methods known in the art, e.g. by use of an automated DNA synthesizer (such as are commercially available from Biosearch, Applied Biosystems, etc.). As examples, phosphorothioate oligonucleotides may be synthesized by the method of Stein et al. (1988, Nucl. Acids Res. 16:3209), methylphosphonate oligonucleotides can be prepared by use of controlled pore glass polymer supports (Sarin et al., 1988, Proc. Natl. Acad. Sci. U.S.A. 85:7448-7451), etc.

[0974] While antisense nucleotides complementary to the coding region sequence could be used, those complementary to the transcribed untranslated region are most preferred.

[0975] Potential antagonists according to the invention also include catalytic RNA, or a ribozyme (See, e.g., PCT International Publication WO 90/11364, published Oct. 4, 1990; Sarver et al., Science 247:1222-1225 (1990). While ribozymes that cleave mRNA at site specific recognition sequences can be used to destroy mRNAs, the use of hammerhead ribozymes is preferred. Hammerhead ribozymes cleave mRNAs at locations dictated by flanking regions that form complementary base pairs with the target mRNA. The sole requirement is that the target mRNA have the following sequence of two bases: 5′-UG-3′. The construction and production of hammerhead ribozymes is well known in the art and is described more fully in Haseloff and Gerlach, Nature 334:585-591 (1988). There are numerous potential hammerhead ribozyme cleavage sites within the nucleotide sequence of SEQ ID NO:X. Preferably, the ribozyme is engineered so that the cleavage recognition site is located near the 5′ end of the mRNA; i.e., to increase efficiency and minimize the intracellular accumulation of non-functional mRNA transcripts.

[0976] As in the antisense approach, the ribozymes of the invention can be composed of modified oligonucleotides (e.g., for improved stability, targeting, etc.) and should be delivered to cells which express in vivo. DNA constructs encoding the ribozyme may be introduced into the cell in the same manner as described above for the introduction of antisense encoding DNA. A preferred method of delivery involves using a DNA construct “encoding” the ribozyme under the control of a strong constitutive promoter, such as, for example, pol III or pol II promoter, so that transfected cells will produce sufficient quantities of the ribozyme to destroy endogenous messages and inhibit translation. Since ribozymes unlike antisense molecules, are catalytic, a lower intracellular concentration is required for efficiency.

[0977] Antagonist/agonist compounds may be employed to inhibit the cell growth and proliferation effects of the polypeptides of the present invention on neoplastic cells and tissues, i.e. stimulation of angiogenesis of tumors, and, therefore, retard or prevent abnormal cellular growth and proliferation, for example, in tumor formation or growth.

[0978] The antagonist/agonist may also be employed to prevent hyper-vascular diseases, and prevent the proliferation of epithelial lens cells after extracapsular cataract surgery. Prevention of the mitogenic activity of the polypeptides of the present invention may also be desirous in cases such as restenosis after balloon angioplasty.

[0979] The antagonist/agonist may also be employed to prevent the growth of scar tissue during wound healing.

[0980] The antagonist/agonist may also be employed to treat the diseases described herein.

[0981] Thus, the invention provides a method of treating disorders or diseases, including but not limited to the disorders or diseases listed throughout this application, associated with overexpression of a polynucleotide of the present invention by administering to a patient (a) an antisense molecule directed to the polynucleotide of the present invention, and/or (b) a ribozyme directed to the polynucleotide of the present invention.

Binding Peptides and Other Molecules

[0982] The invention also encompasses screening methods for identifying polypeptides and nonpolypeptides that bind polypeptides of the invention, and the binding molecules identified thereby. These binding molecules are useful, for example, as agonists and antagonists of the polypeptides of the invention. Such agonists and antagonists can be used, in accordance with the invention, in the therapeutic embodiments described in detail, below.

[0983] This method comprises the steps of:
[0984] contacting polypeptides of the invention with a plurality of molecules; and
[0985] identifying a molecule that binds the polypeptides of the invention.

[0986] The step of contacting the polypeptides of the invention with the plurality of molecules may be effected in a number of ways. For example, one may contemplate immobilizing the polypeptides on a solid support and bringing a solution of the plurality of molecules in contact with the immobilized polypeptides. Such a procedure would be akin to an affinity chromatographic process, with the affinity matrix being comprised of the immobilized polypeptides of the invention. The molecules having a selective affinity for the polypeptides can then be purified by affinity selection. The nature of the solid support, process for attachment of the polypeptides to the solid support, solvent, and conditions of the affinity isolation or selection are largely conventional and well known to those of ordinary skill in the art.

[0987] Alternatively, one may also separate a plurality of polypeptides into substantially separate fractions comprising a subset of or individual polypeptides. For instance, one can separate the plurality of polypeptides by gel electrophoresis, column chromatography, or like method known to those of ordinary skill for the separation of polypeptides. The individual polypeptides can also be produced by a transformed host cell in such a way as to be expressed on or about its outer surface (e.g., a recombinant phage). Individual isolates can then be “probed” by the polypeptides of the invention, optionally in the presence of an inducer should one be required for expression, to determine if any selective affinity interaction takes place between the polypeptides and the individual clone. Prior to contacting the polypeptides with each fraction comprising individual polypeptides, the polypeptides could first be transferred to a solid support for additional convenience. Such a solid support may simply be a piece of filter membrane, such as one made of nitrocellulose or nylon. In this manner, positive clones could be identified from a collection of transformed host cells of an expression library, which harbor a DNA construct encoding a polypeptide having a selective affinity for polypeptides of the invention. Furthermore, the amino acid sequence of the polypeptide having a selective affinity for the polypeptides of the invention can be determined directly by conventional means or the coding sequence of the DNA encoding the polypeptide can frequently be determined more conveniently. The primary sequence can then be deduced from the corresponding DNA sequence. If the amino acid sequence is to be determined from the polypeptide itself, one may use microsequencing techniques. The sequencing technique may include mass spectroscopy.

[0988] In certain situations, it may be desirable to wash away any unbound polypeptides from a mixture of the polypeptides of the invention and the plurality of polypeptides prior to attempting to determine or to detect the presence of a selective affinity interaction. Such a wash step may be particularly desirable when the polypeptides of the invention or the plurality of polypeptides are bound to a solid support.

[0989] The plurality of molecules provided according to this method may be provided by way of diversity libraries, such as random or combinatorial peptide or nonpeptide libraries which can be screened for molecules that specifically bind polypeptides of the invention. Many libraries are known in the art that can be used, e.g., chemically synthesized libraries, recombinant (e.g., phage display libraries), and in vitro translation-based libraries. Examples of chemically synthesized libraries are described in Fodor et al., 1991, Science 251:767-773; Houghten et al., 1991, Nature 354:84-86; Lam et al., 1991, Nature 354:82-84; Medynski, 1994, Bio/Technology 12:709-710;Gallop et al., 1994, J. Medicinal Chemistry 37(9):1233-1251; Ohlmeyer et al., 1993, Proc. Natl. Acad. Sci. USA 90:10922-10926; Erb et al., 1994, Proc. Natl. Acad. Sci. USA 91:11422-11426; Houghten et al., 1992, Biotechniques 13:412; Jayawickreme et al., 1994, Proc. Natl. Acad. Sci. USA 91:1614-1618; Salmon et al., 1993, Proc. Natl. Acad. Sci. USA 90:11708-11712; PCT Publication No. WO 93/20242; and Brenner and Lerner, 1992, Proc. Natl. Acad. Sci. USA 89:5381-5383.

[0990] Examples of phage display libraries are described in Scott and Smith, 1990, Science 249:386-390; Devlin et al., 1990, Science, 249:404-406; Christian, R. B., et al., 1992, J. Mol. Biol. 227:711-718); Lenstra, 1992, J. Immunol. Meth. 152:149-157; Kay et al., 1993, Gene 128:59-65; and PCT Publication No. WO 94/18318 dated Aug. 18, 1994.

[0991] In vitro translation-based libraries include but are not limited to those described in PCT Publication No. WO 91/05058 dated Apr. 18, 1991; and Mattheakis et al., 1994, Proc. Natl. Acad. Sci. USA 91:9022-9026.

[0992] By way of examples of nonpeptide libraries, a benzodiazepine library (see e.g., Bunin et al., 1994, Proc. Natl. Acad. Sci. USA 91:4708-4712) can be adapted for use. Peptoid libraries (Simon et al., 1992, Proc. Natl. Acad. Sci. USA 89:9367-9371) can also be used. Another example of a library that can be used, in which the amide functionalities in peptides have been permethylated to generate a chemically transformed combinatorial library, is described by Ostresh et al. (1994, Proc. Natl. Acad. Sci. USA 91:11138-11142).

[0993] The variety of non-peptide libraries that are useful in the present invention is great. For example, Ecker and Crooke, 1995, Bio/Technology 13:351-360 list benzodiazepines, hydantoins, piperazinediones, biphenyls, sugar analogs, beta-mercaptoketones, arylacetic acids, acylpiperidines, benzopyrans, cubanes, xanthines, aminimides, and oxazolones as among the chemical species that form the basis of various libraries.

[0994] Non-peptide libraries can be classified broadly into two types: decorated monomers and oligomers. Decorated monomer libraries employ a relatively simple scaffold structure upon which a variety functional groups is added. Often the scaffold will be a molecule with a known useful pharmacological activity. For example, the scaffold might be the benzodiazepine structure.

[0995] Non-peptide oligomer libraries utilize a large number of monomers that are assembled together in ways that create new shapes that depend on the order of the monomers. Among the monomer units that have been used are carbamates, pyrrolinones, and morpholinos. Peptoids, peptide-like oligomers in which the side chain is attached to the alpha amino group rather than the alpha carbon, form the basis of another version of non-peptide oligomer libraries. The first non-peptide oligomer libraries utilized a single type of monomer and thus contained a repeating backbone. Recent libraries have utilized more than one monomer, giving the libraries added flexibility.

[0996] Screening the libraries can be accomplished by any of a variety of commonly known methods. See, e.g., the following references, which disclose screening of peptide libraries: Parmley and Smith, 1989, Adv. Exp. Med. Biol. 251:215-218; Scott and Smith, 1990, Science 249:386-390; Fowlkes et al., 1992; BioTechniques 13:422-427; Oldenburg et al., 1992, Proc. Natl. Acad. Sci. USA 89:5393-5397; Yu et al., 1994, Cell 76:933-945; Staudt et al, 1988, Science 241:577-580; Bock et al., 1992, Nature 355:564-566; Tuerk et al., 1992, Proc. Natl. Acad. Sci. USA 89:6988-6992; Ellington et al., 1992, Nature 355:850-852; U.S. Pat. No. 5,096,815, U.S. Pat. No. 5,223,409, and U.S. Pat. No. 5,198,346, all to Ladner et al.; Rebar and Pabo, 1993, Science 263:671-673; and CT Publication No. WO 94/18318.

[0997] In a specific embodiment, screening to identify a molecule that binds polypeptides of the invention can be carried out by contacting the library members with polypeptides of the invention immobilized on a solid phase and harvesting those library members that bind to the polypeptides of the invention. Examples of such screening methods, termed “panning” techniques are described by way of example in Parmley and Smith, 1988, Gene 73:305-318; Fowlkes et al., 1992, BioTechniques 13:422-427; PCT Publication No. WO 94/18318; and in references cited herein.

[0998] In another embodiment, the two-hybrid system for selecting interacting proteins in yeast (Fields and Song, 1989, Nature 340:245-246; Chien et al., 1991, Proc. Natl. Acad. Sci. USA 88:9578-9582) can be used to identify molecules that specifically bind to polypeptides of the invention.

[0999] Where the binding molecule is a polypeptide, the polypeptide can be conveniently selected from any peptide library, including random peptide libraries, combinatorial peptide libraries, or biased peptide libraries. The term “biased” is used herein to mean that the method of generating the library is manipulated so as to restrict one or more parameters that govern the diversity of the resulting collection of molecules, in this case peptides.

[1000] Thus, a truly random peptide library would generate a collection of peptides in which the probability of finding a particular amino acid at a given position of the peptide is the same for all 20 amino acids. A bias can be introduced into the library, however, by specifying, for example, that a lysine occur every fifth amino acid or that positions 4, 8, and 9 of a decapeptide library be fixed to include only arginine. Clearly, many types of biases can be contemplated, and the present invention is not restricted to any particular bias. Furthermore, the present invention contemplates specific types of peptide libraries, such as phage displayed peptide libraries and those that utilize a DNA construct comprising a lambda phage vector with a DNA insert.

[1001] As mentioned above, in the case of a binding molecule that is a polypeptide, the polypeptide may have about 6 to less than about 60 amino acid residues, preferably about 6 to about 10 amino acid residues, and most preferably, about 6 to about 22 amino acids. In another embodiment, a binding polypeptide has in the range of 15-100 amino acids, or 20-50 amino acids.

[1002] The selected binding polypeptide can be obtained by chemical synthesis or recombinant expression.

Other Activities

[1003] A polypeptide, polynucleotide, agonist, or antagonist of the present invention, as a result of the ability to stimulate vascular endothelial cell growth, may be employed in treatment for stimulating re-vascularization of ischemic tissues due to various disease conditions such as thrombosis, arteriosclerosis, and other cardiovascular conditions. The polypeptide, polynucleotide, agonist, or antagonist of the present invention may also be employed to stimulate angiogenesis and limb regeneration, as discussed above.

[1004] A polypeptide, polynucleotide, agonist, or antagonist of the present invention may also be employed for treating wounds due to injuries, burns, post-operative tissue repair, and ulcers since they are mitogenic to various cells of different origins, such as fibroblast cells and skeletal muscle cells, and therefore, facilitate the repair or replacement of damaged or diseased tissue.

[1005] A polypeptide, polynucleotide, agonist, or antagonist of the present invention may also be employed stimulate neuronal growth and to treat and prevent neuronal damage which occurs in certain neuronal disorders or neuro-degenerative conditions such as Alzheimer's disease, Parkinson's disease, and AIDS-related complex. A polypeptide, polynucleotide, agonist, or antagonist of the present invention may have the ability to stimulate chondrocyte growth, therefore, they may be employed to enhance bone and periodontal regeneration and aid in tissue transplants or bone grafts.

[1006] A polypeptide, polynucleotide, agonist, or antagonist of the present invention may be also be employed to prevent skin aging due to sunburn by stimulating keratinocyte growth.

[1007] A polypeptide, polynucleotide, agonist, or antagonist of the present invention may also be employed for preventing hair loss, since FGF family members activate hair-forming cells and promotes melanocyte growth. Along the same lines, a polypeptide, polynucleotide, agonist, or antagonist of the present invention may be employed to stimulate growth and differentiation of hematopoietic cells and bone marrow cells when used in combination with other cytokines.

[1008] A polypeptide, polynucleotide, agonist, or antagonist of the present invention may also be employed to maintain organs before transplantation or for supporting cell culture of primary tissues. A polypeptide, polynucleotide, agonist, or antagonist of the present invention may also be employed for inducing tissue of mesodermal origin to differentiate in early embryos.

[1009] A polypeptide, polynucleotide, agonist, or antagonist of the present invention may also increase or decrease the differentiation or proliferation of embryonic stem cells, besides, as discussed above, hematopoietic lineage.

[1010] A polypeptide, polynucleotide, agonist, or antagonist of the present invention may also be used to modulate mammalian characteristics, such as body height, weight, hair color, eye color, skin, percentage of adipose tissue, pigmentation, size, and shape (e.g., cosmetic surgery). Similarly, a polypeptide, polynucleotide, agonist, or antagonist of the present invention may be used to modulate mammalian metabolism affecting catabolism, anabolism, processing, utilization, and storage of energy.

[1011] A polypeptide, polynucleotide, agonist, or antagonist of the present invention may be used to change a mammal's mental state or physical state by influencing biorhythms, caricadic rhythms, depression (including depressive disorders), tendency for violence, tolerance for pain, reproductive capabilities (preferably by Activin or Inhibin-like activity), hormonal or endocrine levels, appetite, libido, memory, stress, or other cognitive qualities.

[1012] A polypeptide, polynucleotide, agonist, or antagonist of the present invention may also be used as a food additive or preservative, such as to increase or decrease storage capabilities, fat content, lipid, protein, carbohydrate, vitamins, minerals, cofactors or other nutritional components.

[1013] The above-recited applications have uses in a wide variety of hosts. Such hosts include, but are not limited to, human, murine, rabbit, goat, guinea pig, camel, horse, mouse, rat, hamster, pig, micro-pig, chicken, goat, cow, sheep, dog, cat, non-human primate, and human. In specific embodiments, the host is a mouse, rabbit, goat, guinea pig, chicken, rat, hamster, pig, sheep, dog or cat. In preferred embodiments, the host is a mammal. In most preferred embodiments, the host is a human.

### OTHER PREFERRED EMBODIMENTS

[1014] Other preferred embodiments of the claimed invention include an isolated nucleic acid molecule comprising a nucleotide sequence which is at least 95% identical to a sequence of at least about 50 contiguous nucleotides in the nucleotide sequence of SEQ ID NO:X or the complementary strand thereto, the nucleotide sequence as defined in column 5 of Table 1B or columns 8 and 9 of Table 2 or the complementary strand thereto, and/or cDNA contained in ATCC Deposit No:Z.

[1015] Also preferred is a nucleic acid molecule wherein said sequence of contiguous nucleotides is included in the nucleotide sequence of the portion of SEQ ID NO:X as defined in column 5, “ORF (From-To)”, in Table 1B.

[1016] Also preferred is a nucleic acid molecule wherein said sequence of contiguous nucleotides is included in the nucleotide sequence of the portion of SEQ ID NO:X as defined in columns 8 and 9, “NT From” and “NT To” respectively, in Table 2.

[1017] Also preferred is an isolated nucleic acid molecule comprising a nucleotide sequence which is at least 95% identical to a sequence of at least about 150 contiguous nucleotides in the nucleotide sequence of SEQ ID NO:X or the complementary strand thereto, the nucleotide sequence as defined in column 5 of Table 1B or columns 8 and 9 of Table 2 or the complementary strand thereto, and/or cDNA contained in ATCC Deposit No:Z.

[1018] Further preferred is an isolated nucleic acid molecule comprising a nucleotide sequence which is at least 95% identical to a sequence of at least about 500 contiguous nucleotides in the nucleotide sequence of SEQ ID NO:X or the complementary strand thereto, the nucleotide sequence as defined in column 5 of Table 1B or columns 8 and 9 of Table 2 or the complementary strand thereto, and/or cDNA contained in ATCC Deposit No:Z.

[1019] A further preferred embodiment is a nucleic acid molecule comprising a nucleotide sequence which is at least 95% identical to the nucleotide sequence of the portion of SEQ ID NO:X defined in column 5, “ORF (From-To)”, in Table 1B.

[1020] A further preferred embodiment is a nucleic acid molecule comprising a nucleotide sequence which is at least 95% identical to the nucleotide sequence of the portion of SEQ ID NO:X defined in columns 8 and 9, “NT From” and “NT To”, respectively, in Table 2.

[1021] A further preferred embodiment is an isolated nucleic acid molecule comprising a nucleotide sequence which is at least 95% identical to the complete nucleotide sequence of SEQ ID NO:X or the complementary strand thereto, the nucleotide sequence as defined in column 5 of Table 1B or columns 8 and 9 of Table 2 or the complementary strand thereto, and/or cDNA contained in ATCC Deposit No:Z.

[1022] Also preferred is an isolated nucleic acid molecule which hybridizes under stringent hybridization conditions to a nucleic acid molecule comprising a nucleotide sequence of SEQ ID NO:X or the complementary strand thereto, the nucleotide sequence as defined in column 5 of Table 1B or columns 8 and 9 of Table 2 or the complementary strand thereto, and/or cDNA contained in ATCC Deposit No:Z, wherein said nucleic acid molecule which hybridizes does not hybridize under stringent hybridization conditions to a nucleic acid molecule having a nucleotide sequence consisting of only A residues or of only T residues.

[1023] Also preferred is a composition of matter comprising a DNA molecule which comprises the cDNA contained in ATCC Deposit No:Z.

[1024] Also preferred is an isolated nucleic acid molecule comprising a nucleotide sequence which is at least 95% identical to a sequence of at least 50 contiguous nucleotides of the cDNA sequence contained in ATCC Deposit No:Z.

[1025] Also preferred is an isolated nucleic acid molecule, wherein said sequence of at least 50 contiguous nucleotides is included in the nucleotide sequence of an open reading frame sequence encoded by cDNA contained in ATCC Deposit No:Z.

[1026] Also preferred is an isolated nucleic acid molecule comprising a nucleotide sequence which is at least 95% identical to sequence of at least 150 contiguous nucleotides in the nucleotide sequence encoded by cDNA contained in ATCC Deposit No:Z.

[1027] A further preferred embodiment is an isolated nucleic acid molecule comprising a nucleotide sequence which is at least 95% identical to sequence of at least 500 contiguous nucleotides in the nucleotide sequence encoded by cDNA contained in ATCC Deposit No:Z.

[1028] A further preferred embodiment is an isolated nucleic acid molecule comprising a nucleotide sequence which is at least 95% identical to the complete nucleotide sequence encoded by cDNA contained in ATCC Deposit No:Z.

[1029] A further preferred embodiment is a method for detecting in a biological sample a nucleic acid molecule comprising a nucleotide sequence which is at least 95% identical to a sequence of at least 50 contiguous nucleotides in a sequence selected from the group consisting of: a nucleotide sequence of SEQ ID NO:X or the complementary strand thereto; the nucleotide sequence as defined in column 5 of Table 1B or columns 8 and 9 of Table 2 or the complementary strand thereto; and a nucleotide sequence encoded by cDNA contained in ATCC Deposit No:Z; which method comprises a step of comparing a nucleotide sequence of at least one nucleic acid molecule in said sample with a sequence selected from said group and determining whether the sequence of said nucleic acid molecule in said sample is at least 95% identical to said selected sequence.

[1030] Also preferred is the above method wherein said step of comparing sequences comprises determining the extent of nucleic acid hybridization between nucleic acid molecules in said sample and a nucleic acid molecule comprising said sequence selected from said group. Similarly, also preferred is the above method wherein said step of comparing sequences is performed by comparing the nucleotide sequence determined from a nucleic acid molecule in said sample with said sequence selected from said group. The nucleic acid molecules can comprise DNA molecules or RNA molecules.

[1031] A further preferred embodiment is a method for identifying the species, tissue or cell type of a biological sample which method comprises a step of detecting nucleic acid molecules in said sample, if any, comprising a nucleotide sequence that is at least 95% identical to a sequence of at least 50 contiguous nucleotides in a sequence selected from the group consisting of: a nucleotide sequence of SEQ ID NO:X or the complementary strand thereto; the nucleotide sequence as defined in column 5 of Table 1B or columns 8 and 9 of Table 2 or the complementary strand thereto; and a nucleotide sequence of the cDNA contained in ATCC Deposit No:Z.

[1032] The method for identifying the species, tissue or cell type of a biological sample can comprise a step of detecting nucleic acid molecules comprising a nucleotide sequence in a panel of at least two nucleotide sequences, wherein at least one sequence in said panel is at least 95% identical to a sequence of at least 50 contiguous nucleotides in a sequence selected from said group.

[1033] Also preferred is a method for diagnosing in a subject a pathological condition associated with abnormal structure or expression of a nucleotide sequence of SEQ ID NO:X or the complementary strand thereto; the nucleotide sequence as defined in column 5 of Table 1B or columns 8 and 9 of Table 2 or the complementary strand thereto; or the cDNA contained in ATCC Deposit No:Z which encodes a protein, wherein the method comprises a step of detecting in a biological sample obtained from said subject nucleic acid molecules, if any, comprising a nucleotide sequence that is at least 95% identical to a sequence of at least 50 contiguous nucleotides in a sequence selected from the group consisting of: a nucleotide sequence of SEQ ID NO:X or the complementary strand thereto; the nucleotide sequence as defined in column 5 of Table 1B or columns 8 and 9 of Table 2 or the complementary strand thereto; and a nucleotide sequence of cDNA contained in ATCC Deposit No:Z.

[1034] The method for diagnosing a pathological condition can comprise a step of detecting nucleic acid molecules comprising a nucleotide sequence in a panel of at least two nucleotide sequences, wherein at least one sequence in said panel is at least 95% identical to a sequence of at least 50 contiguous nucleotides in a sequence selected from said group.

[1035] Also preferred is a composition of matter comprising isolated nucleic acid molecules wherein the nucleotide sequences of said nucleic acid molecules comprise a panel of at least two nucleotide sequences, wherein at least one sequence in said panel is at least 95% identical to a sequence of at least 50 contiguous nucleotides in a sequence selected from the group consisting of: a nucleotide sequence of SEQ ID NO:X or the complementary strand thereto; the nucleotide sequence as defined in column 4 of Table 1B or columns 8 and 9 of Table 2 or the complementary strand thereto; and a nucleotide sequence encoded by cDNA contained in ATCC Deposit No:Z. The nucleic acid molecules can comprise DNA molecules or RNA molecules.

[1036] Also preferred is a composition of matter comprising isolated nucleic acid molecules wherein the nucleotide sequences of said nucleic acid molecules comprise a DNA microarray or “chip” of at least 1, 2, 3, 4, 5, 6, 7, 8, 9, 10, 15, 20, 25, 30, 40, 50, 100, 150, 200, 250, 300, 500, 1000, 2000, 3000, or 4000 nucleotide sequences, wherein at least one sequence in said DNA microarray or “chip” is at least 95% identical to a sequence of at least 50 contiguous nucleotides in a sequence selected from the group consisting of: a nucleotide sequence of SEQ ID NO:X wherein X is any integer as defined in Table 1A and/or 1B; and a nucleotide sequence encoded by a human cDNA clone identified by a cDNA “Clone ID” in Table 1A and/or 1B.

[1037] Also preferred is an isolated polypeptide comprising an amino acid sequence at least 90% identical to a sequence of at least about 10 contiguous amino acids in the polypeptide sequence of SEQ ID NO:Y; a polypeptide encoded by SEQ ID NO:X or the complementary strand thereto; the polypeptide encoded by the nucleotide sequence as defined in columns 8 and 9 of Table 2; and/or a polypeptide encoded by cDNA contained in ATCC Deposit No:Z.

[1038] Also preferred is an isolated polypeptide comprising an amino acid sequence at least 95% identical to a sequence of at least about 30 contiguous amino acids in the amino acid sequence of SEQ ID NO:Y; a polypeptide encoded by SEQ ID NO:X or the complementary strand thereto; the polypeptide encoded by the nucleotide sequence as defined in columns 8 and 9 of Table 2; and/or a polypeptide encoded by cDNA contained in ATCC Deposit No:Z.

[1039] Further preferred is an isolated polypeptide comprising an amino acid sequence at least 95% identical to a sequence of at least about 100 contiguous amino acids in the amino acid sequence of SEQ ID NO:Y; a polypeptide encoded by SEQ ID NO:X or the complementary strand thereto; the polypeptide encoded by the nucleotide sequence as defined in columns 8 and 9 of Table 2; and/or a polypeptide encoded by cDNA contained in ATCC Deposit No:Z.

[1040] Further preferred is an isolated polypeptide comprising an amino acid sequence at least 95% identical to the complete amino acid sequence of SEQ ID NO:Y; a polypeptide encoded by SEQ ID NO:X or the complementary strand thereto; the polypeptide encoded by the nucleotide sequence as defined in columns 8 and 9 of Table 2; and/or a polypeptide encoded by cDNA contained in ATCC Deposit No:Z.

[1041] Further preferred is an isolated polypeptide comprising an amino acid sequence at least 90% identical to a sequence of at least about 10 contiguous amino acids in the complete amino acid sequence of a polypeptide encoded by contained in ATCC Deposit No:Z

[1042] Also preferred is a polypeptide wherein said sequence of contiguous amino acids is included in the amino acid sequence of a portion of said polypeptide encoded by cDNA contained in ATCC Deposit No:Z; a polypeptide encoded by SEQ ID NO:X or the complementary strand thereto; the polypeptide encoded by the nucleotide sequence as defined in columns 8 and 9 of Table 2; and/or the polypeptide sequence of SEQ ID NO:Y.

[1043] Also preferred is an isolated polypeptide comprising an amino acid sequence at least 95% identical to a sequence of at least about 30 contiguous amino acids in the amino acid sequence of a polypeptide encoded by the cDNA contained in ATCC Deposit No:Z.

[1044] Also preferred is an isolated polypeptide comprising an amino acid sequence at least 95% identical to a sequence of at least about 100 contiguous amino acids in the amino acid sequence of a polypeptide encoded by cDNA contained in ATCC Deposit No:Z.

[1045] Also preferred is an isolated polypeptide comprising an amino acid sequence at least 95% identical to the amino acid sequence of a polypeptide encoded by the cDNA contained in ATCC Deposit No:Z.

[1046] Further preferred is an isolated antibody which binds specifically to a polypeptide comprising an amino acid sequence that is at least 90% identical to a sequence of at least 10 contiguous amino acids in a sequence selected from the group consisting of: a polypeptide sequence of SEQ ID NO:Y; a polypeptide encoded by SEQ ID NO:X or the complementary strand thereto; the polypeptide encoded by the nucleotide sequence as defined in columns 8 and 9 of Table 2; and a polypeptide encoded by the cDNA contained in ATCC Deposit No:Z.

[1047] Further preferred is a method for detecting in a biological sample a polypeptide comprising an amino acid sequence which is at least 90% identical to a sequence of at least 10 contiguous amino acids in a sequence selected from the group consisting of: a polypeptide sequence of SEQ ID NO:Y; a polypeptide encoded by SEQ ID NO:X or the complementary strand thereto; the polypeptide encoded by the nucleotide sequence as defined in columns 8 and 9 of Table 2; and a polypeptide encoded by the cDNA contained in ATCC Deposit No:Z; which method comprises a step of comparing an amino acid sequence of at least one polypeptide molecule in said sample with a sequence selected from said group and determining whether the sequence of said polypeptide molecule in said sample is at least 90% identical to said sequence of at least 10 contiguous amino acids.

[1048] Also preferred is the above method wherein said step of comparing an amino acid sequence of at least one polypeptide molecule in said sample with a sequence selected from said group comprises determining the extent of specific binding of polypeptides in said sample to an antibody which binds specifically to a polypeptide comprising an amino acid sequence that is at least 90% identical to a sequence of at least 10 contiguous amino acids in a sequence selected from the group consisting of: a polypeptide sequence of SEQ ID NO:Y; a polypeptide encoded by SEQ ID NO:X or the complementary strand thereto; the polypeptide encoded by the nucleotide sequence as defined in columns 8 and 9 of Table 2; and a polypeptide encoded by the cDNA contained in ATCC Deposit No:Z.

[1049] Also preferred is the above method wherein said step of comparing sequences is performed by comparing the amino acid sequence determined from a polypeptide molecule in said sample with said sequence selected from said group.

[1050] Also preferred is a method for identifying the species, tissue or cell type of a biological sample which method comprises a step of detecting polypeptide molecules in said sample, if any, comprising an amino acid sequence that is at least 90% identical to a sequence of at least 10 contiguous amino acids in a sequence selected from the group consisting of: polypeptide sequence of SEQ ID NO:Y; a polypeptide encoded by SEQ ID NO:X or the complementary strand thereto; the polypeptide encoded by the nucleotide sequence as defined in columns 8 and 9 of Table 2; and a polypeptide encoded by the cDNA contained in ATCC Deposit No:Z.

[1051] Also preferred is the above method for identifying the species, tissue or cell type of a biological sample, which method comprises a step of detecting polypeptide molecules comprising an amino acid sequence in a panel of at least two amino acid sequences, wherein at least one sequence in said panel is at least 90% identical to a sequence of at least 10 contiguous amino acids in a sequence selected from the above group.

[1052] Also preferred is a method for diagnosing in a subject a pathological condition associated with abnormal structure or expression of a nucleic acid sequence identified in Table 1A, 1B or Table 2 encoding a polypeptide, which method comprises a step of detecting in a biological sample obtained from said subject polypeptide molecules comprising an amino acid sequence in a panel of at least two amino acid sequences, wherein at least one sequence in said panel is at least 90% identical to a sequence of at least 10 contiguous amino acids in a sequence selected from the group consisting of: polypeptide sequence of SEQ ID NO:Y; a polypeptide encoded by SEQ ID NO:X or the complementary strand thereto; the polypeptide encoded by the nucleotide sequence as defined in columns 8 and 9 of Table 2; and a polypeptide encoded by the cDNA contained in ATCC Deposit No:Z.

[1053] In any of these methods, the step of detecting said polypeptide molecules includes using an antibody.

[1054] Also preferred is an isolated nucleic acid molecule comprising a nucleotide sequence which is at least 95% identical to a nucleotide sequence encoding a polypeptide wherein said polypeptide comprises an amino acid sequence that is at least 90% identical to a sequence of at least 10 contiguous amino acids in a sequence selected from the group consisting of: polypeptide sequence of SEQ ID NO:Y; a polypeptide encoded by SEQ ID NO:X or the complementary strand thereto; the polypeptide encoded by the nucleotide sequence as defined in columns 8 and 9 of Table 2; and a polypeptide encoded by the cDNA contained in ATCC Deposit No:Z.

[1055] Also preferred is an isolated nucleic acid molecule, wherein said nucleotide sequence encoding a polypeptide has been optimized for expression of said polypeptide in a prokaryotic host.

[1056] Also preferred is a polypeptide molecule, wherein said polypeptide comprises an amino acid sequence selected from the group consisting of: polypeptide sequence of SEQ ID NO:Y; a polypeptide encoded by SEQ ID NO:X or the complementary strand thereto; the polypeptide encoded by the nucleotide sequence as defined in columns 8 and 9 of Table 2; and a polypeptide encoded by the cDNA contained in ATCC Deposit No:Z.

[1057] Further preferred is a method of making a recombinant vector comprising inserting any of the above isolated nucleic acid molecule into a vector. Also preferred is the recombinant vector produced by this method. Also preferred is a method of making a recombinant host cell comprising introducing the vector into a host cell, as well as the recombinant host cell produced by this method.

[1058] Also preferred is a method of making an isolated polypeptide comprising culturing this recombinant host cell under conditions such that said polypeptide is expressed and recovering said polypeptide. Also preferred is this method of making an isolated polypeptide, wherein said recombinant host cell is a eukaryotic cell and said polypeptide is a human protein comprising an amino acid sequence selected from the group consisting of: polypeptide sequence of SEQ ID NO:Y; a polypeptide encoded by SEQ ID NO:X or the complementary strand thereto; the polypeptide encoded by the nucleotide sequence as defined in columns 8 and 9 of Table 2; and a polypeptide encoded by the cDNA contained in ATCC Deposit No:Z. The isolated polypeptide produced by this method is also preferred.

[1059] Also preferred is a method of treatment of an individual in need of an increased level of a protein activity, which method comprises administering to such an individual a Therapeutic comprising an amount of an isolated polypeptide, polynucleotide, immunogenic fragment or analogue thereof, binding agent, antibody, or antigen binding fragment of the claimed invention effective to increase the level of said protein activity in said individual.

[1060] Also preferred is a method of treatment of an individual in need of a decreased level of a protein activity, which method comprised administering to such an individual a Therapeutic comprising an amount of an isolated polypeptide, polynucleotide, immunogenic fragment or analogue thereof, binding agent, antibody, or antigen binding fragment of the claimed invention effective to decrease the level of said protein activity in said individual.

[1061] Also preferred is a method of treatment of an individual in need of a specific delivery of toxic compositions to diseased cells (e.g., tumors, leukemias or lymphomas), which method comprises administering to such an individual a Therapeutic comprising an amount of an isolated polypeptide of the invention, including, but not limited to a binding agent, or antibody of the claimed invention that are associated with toxin or cytotoxic prodrugs.

[1062] Having generally described the invention, the same will be more readily understood by reference to the following examples, which are provided by way of illustration and are not intended as limiting.

### EXAMPLES

### Example 1

### Isolation of a Selected cDNA Clone from the Deposited Sample

[1063] Each ATCC Deposit No:Z is contained in a plasmid vector. In many cases, the vector used to construct the library is a phage vector from which a plasmid has been excised. The following correlates the related plasmid for each phage vector used in constructing the cDNA library.

| Vector Used to | Corresponding |
|---|---|
| Construct Library | Deposited Plasmid |
| Lambda Zap | pBluescript (pBS) |
| Uni-Zap XR | pBluescript (pBS) |
| Zap Express | pBK |
| lafmid BA | plafmid BA |
| pSport1 | pSport1 |
| pCMVSport 2.0 | pCMVSport 2.0 |
| pCMVSport 3.0 | pCMVSport 3.0 |
| pCR ® 2.1 | pCR ® 2.1 |

[1064] Vectors Lambda Zap (U.S. Pat. Nos. 5,128,256 and 5,286,636), Uni-Zap XR (U.S. Pat. Nos. 5,128,256 and 5,286,636), Zap Express (U.S. Pat. Nos. 5,128,256 and 5,286,636), pBluescript (pBS) (Short, J. M. et al., Nucleic Acids Res. 16:7583-7600 (1988); Alting-Mees, M. A. and Short, J. M., Nucleic Acids Res. 17:9494 (1989)) and pBK (Alting-Mees, M. A. et al., Strategies 5:58-61 (1992)) are conmmercially available from Stratagene Cloning Systems, Inc., 11011 N. Torrey Pines Road, La Jolla, Calif., 92037. pBS contains an ampicillin resistance gene and pBK contains a neomycin resistance gene. Both can be transformed into E. coli strain XL-1 Blue, also available from Stratagene. pBS comes in 4 forms SK+, SK−, KS+ and KS. The S and K refers to the orientation of the polylinker to the T7 and T3 primer sequences which flank the polylinker region (“S” is for SacI and “K” is for KpnI which are the first sites on each respective end of the linker). “+” or “−” refer to the orientation of the f1 origin of replication (“ori”), such that in one orientation, single stranded rescue initiated from the f1 ori generates sense strand DNA and in the other, antisense.

[1065] Vectors pSport1, pCMVSport 2.0, pCMVSport 3.0, and pCMVSport 6 were obtained from Life Technologies, Inc., P. O. Box 6009, Gaithersburg, Md. 20897. All Sport vectors contain an ampicillin resistance gene and may be transformed into E. coli strain DH10B, also available from Life Technologies. (See, for instance, Gruber, C. E., et al., Focus 15:59 (1993)). Vector lafmid BA (Bento Soares, Columbia University, NY) contains an ampicillin resistance gene and can be transformed into E. coli strain XL-1 Blue. Vector pCR®2.1, which is available from Invitrogen, 1600 Faraday Avenue, Carlsbad, Calif. 92008, contains an ampicillin resistance gene and may be transformed into E. coli strain DH10B, available from Life Technologies. (See, for instance, Clark, J. M., Nuc. Acids Res. 16:9677-9686 (1988) and Mead, D. et al., Bio/Technology 9: (1991)). Preferably, a polynucleotide of the present invention does not comprise the phage vector sequences identified for the particular clone in Table 4, as well as the corresponding plasmid vector sequences designated above.

[1066] The deposited material in the sample assigned the ATCC Deposit Number cited by reference to Tables 1, and 2 for any given cDNA clone also may contain one or more additional plasmids, each comprising a cDNA clone different from that given clone. Thus, deposits sharing the same ATCC Deposit Number contain at least a plasmid for each ATCC Deposit No:Z.

[1067] Two nonlimiting examples are provided below for isolating a particular clone from the deposited sample of plasmid cDNAs cited for that clone. First, a plasmid is directly isolated by screening the clones using a polynucleotide probe corresponding to the nucleotide sequence of SEQ ID NO:X.

[1068] Particularly, a specific polynucleotide with 30-40 nucleotides is synthesized using an Applied Biosystems DNA synthesizer according to the sequence reported. The oligonucleotide is labeled, for instance, with ³²P-γ-ATP using T4 polynucleotide kinase and purified according to routine methods. (E.g., Maniatis et al., Molecular Cloning: A Laboratory Manual, Cold Spring Harbor Press, Cold Spring, N.Y. (1982)). The plasmid mixture is transformed into a suitable host, as indicated above (such as XL-1 Blue (Stratagene)) using techniques known to those of skill in the art, such as those provided by the vector supplier or in related publications or patents cited above. The transformants are plated on 1.5% agar plates (containing the appropriate selection agent, e.g., ampicillin) to a density of about 150 transformants (colonies) per plate. These plates are screened using Nylon membranes according to routine methods for bacterial colony screening (e.g., Sambrook et al., Molecular Cloning: A Laboratory Manual, 2nd Edit., (1989), Cold Spring Harbor Laboratory Press, pages 1.93 to 1.104), or other techniques known to those of skill in the art.

[1069] Alternatively, two primers of 17-20 nucleotides derived from both ends of the nucleotide sequence of SEQ ID NO:X are synthesized and used to amplify the desired cDNA using the deposited cDNA plasmid as a template. The polymerase chain reaction is carried out under routine conditions, for instance, in 25 μl of reaction mixture with 0.5 ug of the above cDNA template. A convenient reaction mixture is 1.5-5 mM MgCl₂, 0.01% (w/v) gelatin, 20 μM each of dATP, dCTP, dGTP, dTTP, 25 pmol of each primer and 0.25 Unit of Taq polymerase. Thirty five cycles of PCR (denaturation at 94° C. for 1 min; annealing at 55° C. for 1 min; elongation at 72° C for 1 min) are performed with a Perkin-Elmer Cetus automated thermal cycler. The amplified product is analyzed by agarose gel electrophoresis and the DNA band with expected molecular weight is excised and purified. The PCR product is verified to be the selected sequence by subcloning and sequencing the DNA product.

[1070] Several methods are available for the identification of the 5′ or 3′ non-coding portions of a gene which may not be present in the deposited clone. These methods include but are not limited to, filter probing, clone enrichment using specific probes, and protocols similar or identical to 5′ and 3′ “RACE” protocols which are well known in the art. For instance, a method similar. to 5′ RACE is available for. generating the missing 5′ end of a desired full-length transcript. (Fromont-Racine et al., Nucleic Acids Res. 21(7):1683-1684 (1993)).

[1071] Briefly, a specific RNA oligonucleotide is ligated to the 5′ ends of a population of RNA presumably containing full-length gene RNA transcripts. A primer set containing a primer specific to the ligated RNA oligonucleotide and a primer specific to a known sequence of the gene of interest is used to PCR amplify the 5′ portion of the desired full-length gene. This amplified product may then be sequenced and used to generate the full length gene.

[1072] This above method starts with total RNA isolated from the desired source, although poly-A+ RNA can be used. The RNA preparation can then be treated with phosphatase if necessary to eliminate 5′ phosphate groups on degraded or damaged RNA which may interfere with the later RNA ligase step. The phosphatase should then be inactivated and the RNA treated with tobacco acid pyrophosphatase in order to remove the cap structure present at the 5′ ends of messenger RNAs. This reaction leaves a 5′ phosphate group at the 5′ end of the cap cleaved RNA which can then be ligated to an RNA oligonucleotide using T4 RNA ligase.

[1073] This modified RNA preparation is used as a template for first strand cDNA synthesis using a gene specific oligonucleotide. The first strand synthesis reaction is used as a template for PCR amplification of the desired 5′ end using a primer specific to the ligated RNA oligonucleotide and a primer specific to the known sequence of the gene of interest. The resultant product is then sequenced and analyzed to confirm that the 5′ end sequence belongs to the desired gene.

### Example 2

### Isolation of Genomic Clones Corresponding to a Polynucleotide

[1074] A human genomic P1 library (Genomic Systems, Inc.) is screened by PCR using primers selected for the sequence corresponding to SEQ ID NO:X according to the method described in Example 1. (See also, Sambrook.)

### Example 3

### Tissue Specific Expression Analysis

[1075] The Human Genome Sciences, Inc. (HGS) database is derived from sequencing tissue and/or disease specific cDNA libraries. Libraries generated from a particular tissue are selected and the specific tissue expression pattern of EST groups or assembled contigs within these libraries is determined by comparison of the expression patterns of those groups or contigs within the entire database. ESTs and assembled contigs which show tissue specific expression are selected.

[1076] The original clone from which the specific EST sequence was generated, or in the case of an assembled contig, the clone from which the 5′ most EST sequence was generated, is obtained from the catalogued library of clones and the insert amplified by PCR using methods known in the art. The PCR product is denatured and then transferred in 96 or 384 well format to a nylon membrane (Schleicher and Scheull) generating an array filter of tissue specific clones. Housekeeping genes, maize genes, and known tissue specific genes are included on the filters. These targets can be used in signal normalization and to validate assay sensitivity. Additional targets are included to monitor probe length and specificity of hybridization.

[1077] Radioactively labeled hybridization probes are generated by first strand cDNA synthesis per the manufacturer's instructions (Life Technologies) from mRNA/RNA samples prepared from the specific tissue being analyzed (e.g., prostate, prostate cancer, ovarian, ovarian cancer, etc.). The hybridization probes are purified by gel exclusion chromatography, quantitated, and hybridized with the array filters in hybridization bottles at 65° C. overnight. The filters are washed under stringent conditions and signals are captured using a Fuji phosphorimager.

[1078] Data is extracted using AIS software and following background subtraction, signal normalization is performed. This includes a normalization of filter-wide expression levels between different experimental runs. Genes that are differentially expressed in the tissue of interest are identified.

### Example 4

### Chromosomal Mapping of the Polynucleotides

[1079] An oligonucleotide primer set is designed according to the sequence at the 5′ end of SEQ ID NO:X. This primer preferably spans about 100 nucleotides. This primer set is then used in a polymerase chain reaction under the following set of conditions: 30 seconds, 95° C.; 1 minute, 56° C.; 1 minute, 70° C. This cycle is repeated 32 times followed by one 5 minute cycle at 70° C. Human, mouse, and hamster DNA is used as template in addition to a somatic cell hybrid panel containing individual chromosomes or chromosome fragments (Bios, Inc). The reactions are analyzed on either 8% polyacrylamide gels or 3.5% agarose gels. Chromosome mapping is determined by the presence of an approximately 100 bp PCR fragment in the particular somatic cell hybrid.

### Example 5

### Bacterial Expression of a Polypeptide

[1080] A polynucleotide encoding a polypeptide of the present invention is amplified using PCR oligonucleotide primers corresponding to the 5′ and 3′ ends of the DNA sequence, as outlined in Example 1, to synthesize insertion fragments. The primers used to amplify the cDNA insert should preferably contain restriction sites, such as BamHIl and XbaI, at the 5′ end of the primers in order to clone the amplified product into the expression vector. For example, BamHI and XbaI correspond to the restriction enzyme sites on the bacterial expression vector pQE-9. (Qiagen, Inc., Chatsworth, Calif.). This plasmid vector encodes antibiotic resistance (Amp^{r}), a bacterial origin of replication (ori), an IPTG-regulatable promoter/operator (P/O), a ribosome binding site (RBS), a 6-histidine tag (6-His), and restriction enzyme cloning sites.

[1081] The pQE-9 vector is digested with BamHI and XbaI and the amplified fragment is ligated into the pQE-9 vector maintaining the reading frame initiated at the bacterial RBS. The ligation mixture is then used to transform the E. coli strain M15/rep4 (Qiagen, Inc.) which contains multiple copies of the plasmid pREP4, which expresses the lacI repressor and also confers kanamycin resistance (Kan^{r}). Transformants are identified by their ability to grow on LB plates and ampicillin/kanamycin resistant colonies are selected. Plasmid DNA is isolated and confirmed by restriction analysis.

[1082] Clones containing the desired constructs are grown overnight (O/N) in liquid culture in LB media supplemented with both Amp (100 ug/ml) and Kan (25 ug/ml). The O/N culture is used to inoculate a large culture at a ratio of 1:100 to 1:250. The cells are grown to an optical density 600 (O.D.⁶⁰⁰) of between 0.4 and 0.6. IPTG (Isopropyl-B-D-thiogalacto pyranoside) is then added to a final concentration of 1 mM. IPTG induces by inactivating the lacI repressor, clearing the P/O leading to increased gene expression.

[1083] Cells are grown for an extra 3 to 4 hours. Cells are then harvested by centrifugation (20 mins at 6000×g). The cell pellet is solubilized in the chaotropic agent 6 Molar Guanidine HCl by stirring for 3-4 hours at 4° C. The cell debris is removed by centrifugation, and the supernatant containing the polypeptide is loaded onto a nickel-nitrilo-tri-acetic acid (“Ni-NTA”) affinity resin column (available from QIAGEN, Inc., supra). Proteins with a 6×His tag bind to the Ni-NTA resin with high affinity and can be purified in a simple one-step procedure (for details see: The QIAexpressionist (1995) QIAGEN, Inc., supra).

[1084] Briefly, the supernatant is loaded onto the column in 6 M guanidine-HCl, pH 8. The column is first washed with 10 volumes of 6 M guanidine-HCl, pH 8, then washed with 10 volumes of 6 M guanidine-HCl pH 6, and finally the polypeptide is eluted with 6 M guanidine-HCl, pH 5.

[1085] The purified protein is then renatured by dialyzing it against phosphate-buffered saline (PBS) or 50 mM Na-acetate, pH 6 buffer plus 200 mM NaCl. Alternatively, the protein can be successfully refolded while immobilized on the Ni-NTA column. The recommended conditions are as follows: renature using a linear 6M-1M urea gradient in 500 mM NaCl, 20% glycerol, 20 mM Tris/HCl pH 7.4, containing protease inhibitors. The renaturation should be performed over a period of 1.5 hours or more. After renaturation the proteins are eluted by the addition of 250 mM immidazole. Immidazole is removed by a final dialyzing step against PBS or 50 mM sodium acetate pH 6 buffer plus 200 mM NaCl. The purified protein is stored at 4° C. or frozen at −80° C.

[1086] In addition to the above expression vector, the present invention further includes an expression vector, called pHE4a (ATCC Accession Number 209645, deposited on Feb. 25, 1998) which contains phage operator and promoter elements operatively linked to a polynucleotide of the present invention, called pHE4a. (ATCC Accession Number 209645, deposited on Feb. 25, 1998.) This vector contains: 1) a neomycinphosphotransferase gene as a selection marker, 2) an E. coli origin of replication, 3) a T5 phage promoter sequence, 4) two lac operator sequences, 5) a Shine-Delgarno sequence, and 6) the lactose operon repressor gene (lacIq). The origin of replication (oriC) is derived from pUC19 (LTI, Gaithersburg, Md.). The promoter and operator sequences are made synthetically.

[1087] DNA can be inserted into the pHE4a by restricting the vector with NdeI and XbaI, BamHI, XhoI, or Asp718, running the restricted product on a gel, and isolating the larger fragment (the stuffer fragment should be about 310 base pairs). The DNA insert is generated according to the PCR protocol described in Example 1, using PCR primers having restriction sites for NdeI (5′ primer) and XbaI, BamHI, XhoI, or Asp718 (3′ primer). The PCR insert is gel purified and restricted with compatible enzymes. The insert and vector are ligated according to standard protocols.

[1088] The engineered vector could easily be substituted in the above protocol to express protein in a bacterial system.

### Example 6

### Purification of a Polypeptide from an Inclusion Body

[1089] The following alternative method can be used to purify a polypeptide expressed in E coli when it is present in the form of inclusion bodies. Unless otherwise specified, all of the following steps are conducted at 4-10° C.

[1090] Upon completion of the production phase of the E. coli fermentation, the cell culture is cooled to 4-10° C. and the cells harvested by continuous centrifugation at 15,000 rpm (Heraeus Sepatech). On the basis of the expected yield of protein per unit weight of cell paste and the amount of purified protein required, an appropriate amount of cell paste, by weight, is suspended in a buffer solution containing 100 mM Tris, 50 mM EDTA, pH 7.4. The cells are dispersed to a homogeneous suspension using a high shear mixer.

[1091] The cells are then lysed by passing the solution through a microfluidizer (Microfuidics, Corp. or APV Gaulin, Inc.) twice at 4000-6000 psi. The homogenate is then mixed with NaCl solution to a final concentration of 0.5 M NaCl, followed by centrifugation at 7000×g for 15 min. The resultant pellet is washed again using 0.5M NaCl, 100 mM Tris, 50 mM EDTA, pH 7.4.

[1092] The resulting washed inclusion bodies are solubilized with 1.5 M guanidine hydrochloride (GuHCl) for 2-4 hours. After 7000×g centrifugation for 15 min., the pellet is discarded and the polypeptide containing supernatant is incubated at 4° C. overnight to allow further GuHCl extraction.

[1093] Following high speed centrifugation (30,000×g) to remove insoluble particles, the GuHCl solubilized protein is refolded by quickly mixing the GuHCl extract with 20 volumes of buffer containing 50 mM sodium, pH 4.5, 150 mM NaCl, 2 mM EDTA by vigorous stirring. The refolded diluted protein solution is kept at 4° C. without mixing for 12 hours prior to further purification steps.

[1094] To clarify the refolded polypeptide solution, a previously prepared tangential filtration unit equipped with 0.16 μm membrane filter with appropriate surface area (e.g., Filtron), equilibrated with 40 mM sodium acetate, pH 6.0 is employed. The filtered sample is loaded onto a cation exchange resin (e.g., Poros HS-50, Perseptive Biosystems). The column is washed with 40 mM sodium acetate, pH 6.0 and eluted with 250 mM, 500 mM, 1000 mM, and 1500 mM NaCl in the same buffer, in a stepwise manner. The absorbance at 280 nm of the effluent is continuously monitored. Fractions are collected and further analyzed by SDS-PAGE.

[1095] Fractions containing the polypeptide are then pooled and mixed with 4 volumes of water. The diluted sample is then loaded onto a previously prepared set of tandem columns of strong anion (Poros HQ-50, Perseptive Biosystems) and weak anion (Poros CM-20, Perseptive Biosystems) exchange resins. The columns are equilibrated with 40 mM sodium acetate, pH 6.0. Both columns are washed with 40 mM sodium acetate, pH 6.0, 200 mM NaCl. The CM-20 column is then eluted using a 10 column volume linear gradient ranging from 0.2 M NaCl, 50 mM sodium acetate, pH 6.0 to 1.0 M NaCl, 50 mM sodium acetate, pH 6.5. Fractions are collected under constant A₂₈₀ monitoring of the effluent. Fractions containing the polypeptide (determined, for instance, by 16% SDS-PAGE) are then pooled.

[1096] The resultant polypeptide should exhibit greater than 95% purity after the above refolding and purification steps. No major contaminant bands should be observed from Commassie blue stained 16% SDS-PAGE gel when 5 μg of purified protein is loaded. The purified protein can also be tested for endotoxin/LPS contamination, and typically the LPS content is less than 0.1 ng/ml according to LAL assays.

### Example 7

### Cloning and Expression of a Polypeptide in a Baculovirus Expression System

[1097] In this example, the plasmid shuttle vector pA2 is used to insert a polynucleotide into a baculovirus to express a polypeptide. This expression vector contains the strong polyhedrin promoter of the Autographa californica nuclear polyhedrosis virus (AcMNPV) followed by convenient restriction sites such as BamHI, Xba I and Asp718. The polyadenylation site of the simian virus 40 (“SV40”) is used for efficient polyadenylation. For easy selection of recombinant virus, the plasmid contains the beta-galactosidase gene from E. coli under control of a weak Drosophila promoter in the same orientation, followed by the polyadenylation signal of the polyhedrin gene. The inserted genes are flanked on both sides by viral sequences for cell-mediated homologous recombination with wild-type viral DNA to generate a viable virus that express the cloned polynucleotide.

[1098] Many other baculovirus vectors can be used in place of the vector above, such as pAc373, pVL941, and pAcIM1, as one skilled in the art would readily appreciate, as long as the construct provides appropriately located signals for transcription, translation, secretion and the like, including a signal peptide and an in-frame AUG as required. Such vectors are described, for instance, in Luckow et al., Virology 170:31-39 (1989).

[1099] Specifically, the cDNA sequence contained in the deposited clone, including the AUG initiation codon, is amplified using the PCR protocol described in Example 1. If a naturally occurring signal sequence is used to produce the polypeptide of the present invention, the pA2 vector does not need a second signal peptide. Alternatively, the vector can be modified (pA2 GP) to include a baculovirus leader sequence, using the standard methods described in Summers et al., “A Manual of Methods for Baculovirus Vectors and Insect Cell Culture Procedures,” Texas Agricultural Experimental Station Bulletin No. 1555 (1987).

[1100] The amplified fragment is isolated from a 1% agarose gel using a commercially available kit (“Geneclean,” BIO 101 Inc., La Jolla, Calif.). The fragment then is digested with appropriate restriction enzymes and again purified on a 1% agarose gel.

[1101] The plasmid is digested with the corresponding restriction enzymes and optionally, can be dephosphorylated using calf intestinal phosphatase, using routine procedures known in the art. The DNA is then isolated from a 1% agarose gel using a commercially available kit (“Genecleari” BIO 101 Inc., La Jolla, Calif.).

[1102] The fragment and the dephosphorylated plasmid are ligated together with T4 DNA ligase. E. coli HB101 or other suitable E. coli hosts such as XL-1 Blue (Stratagene Cloning Systems, La Jolla, Calif.) cells are transformed with the ligation mixture and spread on culture plates. Bacteria containing the plasmid are identified by digesting DNA from individual colonies and analyzing the digestion product by gel electrophoresis. The sequence of the cloned fragment is confirmed by DNA sequencing.

[1103] Five μg of a plasmid containing the polynucleotide is co-transfected with 1.0 μg of a commercially available linearized baculovirus DNA (“BaculoGold™ baculovirus DNA, Pharmingen, San Diego, Calif), using the lipofection method described by Felgner et al., Proc. Natl. Acad. Sci. USA 84:7413-7417 (1987). One μg of BaculoGold™ virus DNA and 5 μg of the plasmid are mixed in a sterile well of a microtiter plate containing 50 μl of serum-free Grace's medium (Life Technologies Inc., Gaithersburg, Md.). Afterwards, 10 μl Lipofectin plus 90 μl Grace's medium are added, mixed and incubated for 15 minutes at room temperature. Then the transfection mixture is added drop-wise to Sf9 insect cells (ATCC CRL 1711) seeded in a 35 mm tissue culture plate with 1 ml Grace's medium without serum. The plate is then incubated for 5 hours at 27° C. The transfection solution is then removed from the plate and 1 ml of Grace's insect medium supplemented with 10% fetal calf serum is added. Cultivation is then continued at 27° C. for four days.

[1104] After four days the supernatant is collected and a plaque assay is performed, as described by Summers and Smith, supra. An agarose gel with “Blue Gal” (Life Technologies Inc., Gaithersburg) is used to allow easy identification and isolation of gal-expressing clones, which produce blue-stained plaques. (A detailed description of a “plaque assay” of this type can also be found in the user's guide for insect cell culture and baculovirology distributed by Life Technologies Inc., Gaithersburg, page 9-10.) After appropriate incubation, blue stained plaques are picked with the tip of a micropipettor (e.g., Eppendorf). The agar containing the recombinant viruses is then resuspended in a microcentrifuge tube containing 200 μl of Grace's medium and the suspension containing the recombinant baculovirus is used to infect Sf9 cells seeded in 35 mm dishes. Four days later the supernatants of these culture dishes are harvested and then they are stored at 4° C.

[1105] To verify the expression of the polypeptide, Sf9 cells are grown in Grace's medium supplemented with 10% heat-inactivated FBS. The cells are infected with the recombinant baculovirus containing the polynucleotide at a multiplicity of infection (“MOI”) of about 2. If radiolabeled proteins are desired, 6 hours later the medium is removed and is replaced with SF900 II medium minus methionine and cysteine (available from Life Technologies Inc., Rockville, Md.). After 42 hours, 5 μCi of ³⁵S-methionine and 5 μCi ³⁵S-cysteine (available from Amersham) are added. The cells are further incubated for 16 hours and then are harvested by centrifugation. The proteins in the supernatant as well as the intracellular proteins are analyzed by SDS-PAGE followed by autoradiography (if radiolabeled).

[1106] Microsequencing of the amino acid sequence of the amino terminus of purified protein may be used to determine the amino terminal sequence of the produced protein.

### Example 8

### Expression of a Polypeptide in Mammalian Cells

[1107] The polypeptide of the present invention can be expressed in a mammalian cell. A typical mammalian expression vector contains a promoter element, which mediates the initiation of transcription of mRNA, a protein coding sequence, and signals required for the termination of transcription and polyadenylation of the transcript. Additional elements include enhancers, Kozak sequences and intervening sequences flanked by donor and acceptor sites for RNA splicing. Highly efficient transcription is achieved with the early and late promoters from SV40, the long terminal repeats (LTRs) from Retroviruses, e.g., RSV, HTLVI, HIVI and the early promoter of the cytomegalovirus (CMV). However, cellular elements can also be used (e.g., the human actin promoter).

[1108] Suitable expression vectors for use in practicing the present invention include, for example, vectors such as pSVL and pMSG (Pharmacia, Uppsala, Sweden), pRSVcat (ATCC 37152), pSV2dhfr (ATCC 37146), pBC12MI (ATCC 67109), pCMVSport 2.0, and pCMVSport 3.0. Mammalian host cells that could be used include, human Hela, 293, H9 and Jurkat cells, mouse NIH3T3 and C127 cells, Cos 1, Cos 7 and CV1, quail QC1-3 cells, mouse L cells and Chinese hamster ovary (CHO) cells.

[1109] Alternatively, the polypeptide can be expressed in stable cell lines containing the polynucleotide integrated into a chromosome. The co-transfection with a selectable marker such as DHFR, gpt, neomycin, or hygromycin allows the identification and isolation of the transfected cells.

[1110] The transfected gene can also be amplified to express large amounts of the encoded protein. The DHFR (dihydrofolate reductase) marker is useful in developing cell lines that carry several hundred or even several thousand copies of the gene of interest. (See, e.g., Alt, F. W., et al., J. Biol. Chem. 253:1357-1370 (1978); Hamlin, J. L. and Ma, C., Biochem. et Biophys. Acta, 1097:107-143 (1990); Page, M. J. and Sydenham, M. A., Biotechnology 9:64-68 (1991)). Another useful selection marker is the enzyme glutamine synthase (GS) (Murphy et al., Biochem J. 227:277-279 (1991); Bebbington et al., Bio/Technology 10:169-175 (1992). Using these markers, the mammalian cells are grown in selective medium and the cells with the highest resistance are selected. These cell lines contain the amplified gene(s) integrated into a chromosome. Chinese hamster ovary (CHO) and NSO cells are often used for the production of proteins.

[1111] Derivatives of the plasmid pSV2-dhfr (ATCC Accession No. 37146), the expression vectors pC4 (ATCC Accession No. 209646) and pC6 (ATCC Accession No.209647) contain the strong promoter (LTR) of the Rous Sarcoma Virus (Cullen et al., Molecular and Cellular Biology, 438-447 (March, 1985)) plus a fragment of the CMV-enhancer (Boshart et al., Cell 41:521-530 (1985)). Multiple cloning sites, e.g., with the restriction enzyme cleavage sites BamHI, XbaI and Asp718, facilitate the cloning of the gene of interest. The vectors also contain the 3′ intron, the polyadenylation and termination signal of the rat preproinsulin gene, and the mouse DHFR gene under control of the SV40 early promoter.

[1112] Specifically, the plasmid pC6, for example, is digested with appropriate restriction enzymes and then dephosphorylated using calf intestinal phosphates by procedures known in the art. The vector is then isolated from a 1% agarose gel.

[1113] A polynucleotide of the present invention is amplified according to the protocol outlined in Example 1. If a naturally occurring signal sequence is used to produce the polypeptide of the present invention, the vector does not need a second signal peptide. Alternatively, if a naturally occurring signal sequence is not used, the vector can be modified to include a heterologous signal sequence. (See, e.g., International Publication No. WO 96/34891.)

[1114] The amplified fragment is isolated from a 1% agarose gel using a commercially available kit (“Geneclean,” BIO 101 Inc., La Jolla, Calif.). The fragment then is digested with appropriate restriction enzymes and again purified on a 1% agarose gel.

[1115] The amplified fragment is then digested with the same restriction enzyme and purified on a 1% agarose gel. The isolated fragment and the dephosphorylated vector are then ligated with T4 DNA ligase. E. coli HB101 or XL-1 Blue cells are then transformed and bacteria are identified that contain the fragment inserted into plasmid pC6 using, for instance, restriction enzyme analysis.

[1116] Chinese hamster ovary cells lacking an active DHFR gene is used for transfection. Five μg of the expression plasmid pC6 or pC4 is cotransfected with 0.5 μg of the plasmid pSVneo using lipofectin (Felgner et al., supra). The plasmid pSV2-neo contains a dominant selectable marker, the neo gene from Tn5 encoding an enzyme that confers resistance to a group of antibiotics including G418. The cells are seeded in alpha minus MEM supplemented with 1 mg/ml G418. After 2 days, the cells are trypsinized and seeded in hybridoma cloning plates (Greiner, Germany) in alpha minus MEM supplemented with 10, 25, or 50 ng/ml of methotrexate plus 1 mg/ml G418. After about 10-14 days single clones are trypsinized and then seeded in 6-well petri dishes or 10 ml flasks using different concentrations of methotrexate (50 nM, 100 nM, 200 nM, 400 nM, 800 nM). Clones growing at the highest concentrations of methotrexate are then transferred to new 6-well plates containing even higher concentrations of methotrexate (1 μM, 2 μM, 5 μM, 10 mM, 20 mM). The same procedure is repeated until clones are obtained which grow at a concentration of 100-200 μM. Expression of the desired gene product is analyzed, for instance, by SDS-PAGE and Western blot or by reversed phase HPLC analysis.

### Example 9

### Protein Fusions

[1117] The polypeptides of the present invention are preferably fused to other proteins. These fusion proteins can be used for a variety of applications. For example, fusion of the present polypeptides to His-tag, HA-tag, protein A, IgG domains, and maltose binding protein facilitates purification. (See Example 5; see also EP A 394,827; Traunecker, et al., Nature 331:84-86 (1988)). Similarly, fusion to IgG-1, IgG-3, and albumin increases the halflife time in vivo. Nuclear localization signals fused to the polypeptides of the present invention can target the protein to a specific subcellular localization, while covalent heterodimer or homodimers can increase or decrease the activity of a fusion protein. Fusion proteins can also create chimeric molecules having more than one function. Finally, fusion proteins can increase solubility and/or stability of the fused protein compared to the non-fused protein. All of the types of fusion proteins described above can be made by modifying the following protocol, which outlines the fusion of a polypeptide to an IgG molecule, or the protocol described in Example 5.

[1118] Briefly, the human Fc portion of the IgG molecule can be PCR amplified, using primers that span the 5′ and 3′ ends of the sequence described below. These primers also should have convenient restriction enzyme sites that will facilitate cloning into an expression vector, preferably a mammalian expression vector.

[1119] For example, if pC4 (ATCC Accession No. 209646) is used, the human Fc portion can be ligated into the BamHI cloning site. Note that the 3′ BamHI site should be destroyed. Next, the vector containing the human Fc portion is re-restricted with BamHI, linearizing the vector, and a polynucleotide of the present invention, isolated by the PCR protocol described in Example 1, is ligated into this BamHI site. Note that the polynucleotide is cloned without a stop codon, otherwise a fusion protein will not be produced.

[1120] If the naturally occurring signal sequence is used to produce the polypeptide of the present invention, pC4 does not need a second signal peptide. Alternatively, if the naturally occurring signal sequence is not used, the vector can be modified to include a heterologous signal sequence. (See, e.g., International Publication No. WO 96/34891.)

| | |
|---|---|
| Human IgG Fc region: | |
| GGGATCCGGAGCCCAAATCTTCTGACAAAACTCACACATGCCCACCGTGCCCA | (SEQ ID NO: 1) |
| GCACCTGAATTCGAGGGTGCACCGTCAGTCTTCCTCTTCCCCCCAAAACCCAAG | |
| GACACCCTCATGATCTCCCGGACTCCTGAGGTCACATGCGTGGTGGTGGACGTA | |
| AGCCACGAAGACCCTGAGGTCAAGTTCAACTGGTACGTGGACGGCGTGGAGGT | |
| GCATAATGCCAAGACAAAGCCGCGGGAGGAGCAGTACAACAGCACGTACCGTG | |
| TGGTCAGCGTCCTCACCGTCCTGCACCAGGACTGGCTGAATGGCAAGGAGTAC | |
| AAGTGCAAGGTCTCCAACAAAGCCCTCCCAACCCCCATCGAGAAAACCATCTC | |
| CAAAGCCAAAGGGCAGCCCCGAGAACCACAGGTGTACACCCTGCCCCCATCCC | |
| GGGATGAGCTGACCAAGAACCAGGTCAGCCTGACCTGCCTGGTCAAAGGCTTC | |
| TATCCAAGCGACATCGCCGTGGAGTGGGAGAGCAATGGGCAGCCGGAGAACAA | |
| CTACAAGACCACGCCTCCCGTGCTGGACTCCGACGGCTCCTTCTTCCTCTACAG | |
| CAAGCTCACCGTGGACAAGAGCAGGTGGCAGCAGGGGAACGTCTTCTCATGCT | |
| CCGTGATGCATGAGGCTCTGCACAACCACTACACGCAGAAGAGCCTCTCCCTGT | |
| CTCCGGGTAAATGAGTGCGACGGCCGCGACTCTAGAGGAT | |

### Example 10

### Production of an Antibody from a Polypeptide

a) Hybridoma Technology

[1121] The antibodies of the present invention can be prepared by a variety of methods. (See, Current Protocols, Chapter 2.) As one example of such methods, cells expressing a polypeptide of the present invention are administered to an animal to induce the production of sera containing polyclonal antibodies. In a preferred method, a preparation of a polypeptide of the present invention is prepared and purified to render it substantially free of natural contaminants. Such a preparation is then introduced into an animal in order to produce polyclonal antisera of greater specific activity.

[1122] Monoclonal antibodies specific for a polypeptide of the present invention are prepared using hybridoma technology (Kohler et al., Nature 256:495 (1975); Kohler et al., Eur. J. Immunol. 6:511 (1976); Kohler et al., Eur. J. Immunol. 6:292 (1976); Hammerling et al., in: Monoclonal Antibodies and T-Cell Hybridomas, Elsevier, N.Y., pp. 563-681 (1981)). In general, an animal (preferably a mouse) is immunized with a polypeptide of the present invention or, more preferably, with a secreted polypeptide-expressing cell. Such polypeptide-expressing cells are cultured in any suitable tissue culture medium, preferably in Earle's modified Eagle's medium supplemented with 10% fetal bovine serum (inactivated at about 56° C.), and supplemented with about 10 g/l of nonessential amino acids, about 1,000 U/ml of penicillin, and about 100 μg/ml of streptomycin.

[1123] The splenocytes of such mice are extracted and fused with a suitable myeloma cell line. Any suitable myeloma cell line may be employed in accordance with the present invention; however, it is preferable to employ the parent myeloma cell line (SP20), available from the ATCC. After fusion, the resulting hybridoma cells are selectively maintained in HAT medium, and then cloned by limiting dilution as described by Wands et al. (Gastroenterology 80:225-232 (1981)). The hybridoma cells obtained through such a selection are then assayed to identify clones which secrete antibodies capable of binding the polypeptide of the present invention.

[1124] Alternatively, additional antibodies capable of binding to a polypeptide of the present invention can be produced in a two-step procedure using anti-idiotypic antibodies. Such a method makes use of the fact that antibodies are themselves antigens, and therefore, it is possible to obtain an antibody which binds to a second antibody. In accordance with this method, protein specific antibodies are used to immunize an animal, preferably a mouse. The splenocytes of such an animal are then used to produce hybridoma cells, and the hybridoma cells are screened to identify clones which produce an antibody whose ability to bind to the polypeptide-specific antibody can be blocked by said polypeptide. Such antibodies comprise anti-idiotypic antibodies to the polypeptide-specific antibody and are used to immunize an animal to induce formation of further polypeptide-specific antibodies.

[1125] For in vivo use of antibodies in humans, an antibody is “humanized”. Such antibodies can be produced using genetic constructs derived from hybridoma cells producing the monoclonal antibodies described above. Methods for producing chimeric and humanized antibodies are known in the art and are discussed herein. (See, for review, Morrison, Science 229:1202 (1985); Oi et al., BioTechniques 4:214 (1986); Cabilly et al., U.S. Pat. No. 4,816,567; Taniguchi et al., EP 171496; Morrison et al., EP 173494; Neuberger et al., WO 8601533; Robinson et al., International Publication No. WO 8702671; Boulianne et al., Nature 312:643 (1984); Neuberger et al., Nature 314:268 (1985)).

b) Isolation of Antibody Fragments Directed Against a Polypeptide of the Present Invention from a Library of scFvs

[1126] Naturally occurring V-genes isolated from human PBLs are constructed into a library of antibody fragments which contain reactivities against a polypeptide of the present invention to which the donor may or may not have been exposed (see e.g., U.S. Pat. No. 5,885,793 incorporated herein by reference in its entirety).

[1127] Rescue of the Library. A library of scFvs is constructed from the RNA of human PBLs as described in International Publication No. WO 92/01047. To rescue phage displaying antibody fragments, approximately 10⁹ E. coli harboring the phagemid are used to inoculate 50 ml of 2×TY containing 1% glucose and 100 μg/ml of ampicillin (2×TY-AMP-GLU) and grown to an O.D. of 0.8 with shaking. Five ml of this culture is used to inoculate 50 ml of 2×TY-AMP-GLU, 2×108 TU of delta gene 3 helper (M13 delta gene III, see International Publication No. WO 92/01047) are added and the culture incubated at 37° C. for 45 minutes without shaking and then at 37° C. for 45 minutes with shaking. The culture is centrifuged at 4000 r.p.m. for 10 min. and the pellet resuspended in 2 liters of 2×TY containing 100 μg/ml ampicillin and 50 ug/ml kanamycin and grown overnight. Phage are prepared as described in International Publication No. WO 92/01047.

[1128] M13 delta gene Im is prepared as follows: M13 delta gene III helper phage does not encode gene III protein, hence the phage(mid) displaying antibody fragments have a greater avidity of binding to antigen. Infectious M13 delta gene III particles are made by growing the helper phage in cells harboring a pUC19 derivative supplying the wild type gene III protein during phage morphogenesis. The culture is incubated for 1 hour at 37° C. without shaking and then for a further hour at 37° C. with shaking. Cells are spun down (IEC-Centra 8,400 r.p.m. for 10 min), resuspended in 300 ml 2×TY broth containing 100 μg ampicillin/ml and 25 μg kanamycin/ml (2×TY-AMP-KAN) and grown overnight, shaking at 37° C. Phage particles are purified and concentrated from the culture medium by two PEG-precipitations (Sambrook et al., 1990), resuspended in 2 ml PBS and passed through a 0.45 μm filter (Minisart NML; Sartorius) to give a final concentration of approximately 10¹³ transducing units/ml (ampicillin-resistant clones).

[1129] Panning of the Library. Inmunotubes (Nunc) are coated overnight in PBS with 4 ml of either 100 μg/ml or 10 pg/ml of a polypeptide of the present invention. Tubes are blocked with 2% Marvel-PBS for 2 hours at 37° C. and then twashed 3 times in PBS. Approximately 10¹³ TU of phage is applied to the tube and incubated for 30 minutes at room temperature tumbling on an over and under turntable and then left to stand for another 1.5 hours. Tubes are washed 10 times with PBS 0.1% Tween-20 and 10 times with PBS. Phage are eluted by adding 1 ml of 100 mM triethylamine and rotating 15 minutes on an under and over turntable after which the solution is immediately neutralized with 0.5 ml of 1.0M Tris-HCl, pH 7.4. Phage are then used to infect 10 ml of mid-log E. coli TG1 by incubating eluted phage with bacteria for 30 minutes at 37° C. The E. coli are then plated on TYE plates containing 1% glucose and 100 μg/ml ampicillin. The resulting bacterial library is then rescued with delta gene 3 helper phage as described above to prepare phage for a subsequent round of selection. This process is then repeated for a total of 4 rounds of affinity purification with tube-washing increased to 20 times with PBS, 0.1% Tween-20 and 20 times with PBS for rounds 3 and 4.

[1130] Characterization of Binders. Eluted phage from the 3rd and 4th rounds of selection are used to infect E. coli HB 2151 and soluble scFv is produced (Marks, et al., 1991) from single colonies for assay. ELISAs are performed with microtitre plates coated with either 10 pg/ml of the polypeptide of the present invention in 50 mM bicarbonate pH 9.6. Clones positive in ELISA are further characterized by PCR fingerprinting (see, e.g., International Publication No. WO 92/01047) and then by sequencing. These ELISA positive clones may also be further characterized by techniques known in the art, such as, for example, epitope mapping, binding affinity, receptor signal transduction, ability to block or competitively inhibit antibody/antigen binding, and competitive agonistic or antagonistic activity.

### Example 11

### Method of Determining Alterations in a Gene Corresponding to a Polynucleotide

[1131] RNA isolated from entire families or individual patients presenting with a phenotype of interest (such as a disease) is isolated. CDNA is then generated from these RNA samples using protocols known in the art. (See, Sambrook.) The cDNA is then used as a template for PCR, employing primers surrounding regions of interest in SEQ ID NO:X; and/or the nucleotide sequence of the cDNA contained in ATCC Deposit No:Z. Suggested PCR conditions consist of 35 cycles at 95 degrees C. for 30 seconds; 60-120 seconds at 52-58 degrees C.; and 60-120 seconds at 70 degrees C., using buffer solutions described in Sidransky et al., Science 252:706 (1991).

[1132] PCR products are then sequenced using primers labeled at their 5′ end with T4 polynucleotide kinase, employing SequiTherm Polymerase (Epicentre Technologies). The intron-exon boundaries of selected exons is also determined and genomic PCR products analyzed to confirm the results. PCR products harboring suspected mutations are then cloned and sequenced to validate the results of the direct sequencing.

[1133] PCR products are cloned into T-tailed vectors as described in Holton et al., Nucleic Acids Research, 19:1156 (1991) and sequenced with T7 polymerase (United States Biochemical). Affected individuals are identified by mutations not present in unaffected individuals.

[1134] Genomic rearrangements are also observed as a method of determining alterations in a gene corresponding to a polynucleotide. Genomic clones isolated according to Example 2 are nick-translated with digoxigenindeoxy-uridine 5′-triphosphate (Boehringer Manheim), and FISH performed as described in Johnson et al., Methods Cell Biol. 35:73-99 (1991). Hybridization with the labeled probe is carried out using a vast excess of human cot-1 DNA for specific hybridization to the corresponding genomic locus.

[1135] Chromosomes are counterstained with 4,6-diamino-2-phenylidole and propidium iodide, producing a combination of C— and R-bands. Aligned images for precise mapping are obtained using a triple-band filter set (Chroma Technology, Brattleboro, Vt.) in combination with a cooled charge-coupled device camera (Photometrics, Tucson, Ariz.) and variable excitation wavelength filters. (Johnson et al., Genet. Anal. Tech. Appl., 8:75 (1991)). Image collection, analysis and chromosomal fractional length measurements are performed using the ISee Graphical Program System. (Inovision Corporation, Durham, N.C.) Chromosome alterations of the genornic region hybridized by the probe are identified as insertions, deletions, and translocations. These alterations are used as a diagnostic marker for an associated disease.

### Example 12

### Method of Detecting Abnormal Levels of a Polypeptide in a Biological Sample

[1136] A polypeptide of the present invention can be detected in a biological sample, and if an increased or decreased level of the polypeptide is detected, this polypeptide is a marker for a particular phenotype. Methods of detection are numerous, and thus, it is understood that one skilled in the art can modify the following assay to fit their particular needs.

[1137] For example, antibody-sandwich ELISAs are used to detect polypeptides in a sample, preferably a biological sample. Wells of a microtiter plate are coated with specific antibodies, at a final concentration of 0.2 to 10 ug/ml. The antibodies are either monoclonal or polyclonal and are produced by the method described in Example 10. The wells are blocked so that non-specific binding of the polypeptide to the well is reduced.

[1138] The coated wells are then incubated for >2 hours at RT with a sample containing the polypeptide. Preferably, serial dilutions of the sample should be used to validate results. The plates are then washed three times with deionized or distilled water to remove unbound polypeptide.

[1139] Next, 50 ul of specific antibody-alkaline phosphatase conjugate, at a concentration of 25-400 ng, is added and incubated for 2 hours at room temperature. The plates are again washed three times with deionized or distilled water to remove unbound conjugate.

[1140] Add 75 ul of 4-methylumbelliferyl phosphate (MUP) or p-nitrophenyl phosphate (NPP) substrate solution to each well and incubate 1 hour at room temperature. Measure the reaction by a microtiter plate reader. Prepare a standard curve, using serial dilutions of a control sample, and plot polypeptide concentration on the X-axis (log scale) and fluorescence or absorbance of the Y-axis (linear scale). Interpolate the concentration of the polypeptide in the sample using the standard curve.

### Example 13

### Formulation

[1141] The invention also provides methods of treatment and/or prevention of diseases or disorders (such as, for example, any one or more of the diseases or disorders disclosed herein) by administration to a subject of an effective amount of a Therapeutic. By therapeutic is meant polynucleotides or polypeptides of the invention (including fragments and variants), agonists or antagonists thereof, and/or antibodies thereto, in combination with a pharmaceutically acceptable carrier type (e.g., a sterile carrier).

[1142] The Therapeutic will be formulated and dosed in a fashion consistent with good medical practice, taking into account the clinical condition of the individual patient (especially the side effects of treatment with the Therapeutic alone), the site of delivery, the method of administration, the scheduling of administration, and other factors known to practitioners. The “effective amount” for purposes herein is thus determined by such considerations.

[1143] As a general proposition, the total pharmaceutically effective amount of the Therapeutic administered parenterally per dose will be in the range of about 1 ug/kg/day to 10 mg/kg/day of patient body weight, although, as noted above, this will be subject to therapeutic discretion. More preferably, this dose is at least 0.01 mg/kg/day, and most preferably for humans between about 0.01 and 1 mg/kg/day for the hormone. If given continuously, the Therapeutic is typically administered at a dose rate of about 1 ug/kg/hour to about 50 ug/kg/hour, either by 14 injections per day or by continuous subcutaneous infusions, for example, using a mini-pump. An intravenous bag solution may also be employed. The length of treatment needed to observe changes and the interval following treatment for responses to occur appears to vary depending on the desired effect.

[1144] Therapeutics can be are administered orally, rectally, parenterally, intracistemally, intravaginally, intraperitoneally, topically (as by powders, ointments, gels, drops or transdermal patch), bucally, or as an oral or nasal spray. “Pharmaceutically acceptable carrier” refers to a non-toxic solid, semisolid or liquid filler, diluent, encapsulating material or formulation auxiliary of any. The term “parenteral” as used herein refers to modes of administration which include intravenous, intramuscular, intraperitoneal, intrastemal, subcutaneous and intraarticular injection and infusion.

[1145] Therapeutics of the invention are also suitably administered by sustained-release systems. Suitable examples of sustained-release Therapeutics are administered orally, rectally, parenterally, intracistemally, intravaginally, intraperitoneally, topically (as by powders, ointments, gels, drops or transdermal patch), bucally, or as an oral or nasal spray. “Pharmaceutically acceptable carrier” refers to a non-toxic solid, semisolid or liquid filler, diluent, encapsulating material or formulation auxiliary of any type. The term “parenteral” as used herein refers to modes of administration which include intravenous, intramuscular, intraperitoneal, intrastemal, subcutaneous and intraarticular injection and infusion.

[1146] Therapeutics of the invention are also suitably administered by sustained-release systems. Suitable examples of sustained-release Therapeutics include suitable polymeric materials (such as, for example, semi-permeable polymer matrices in the form of shaped articles, e.g., films, or mirocapsules), suitable hydrophobic materials (for example as an emulsion in an acceptable oil) or ion exchange resins, and sparingly soluble derivatives (such as, for example, a sparingly soluble salt).

[1147] Sustained-release matrices include polylactides (U.S. Pat. No. 3,773,919, EP 58,481), copolymers of L-glutamic acid and gamma-ethyl-L-glutamate (Sidman et al., Biopolymers 22:547-556 (1983)), poly (2-hydroxyethyl methacrylate) (Langer et al., J. Biomed. Mater. Res. 15:167-277 (1981), and Langer, Chem. Tech. 12:98-105 (1982)), ethylene vinyl acetate (Langer et al., Id.) or poly-D-(−)-3-hydroxybutyric acid (EP 133,988).

[1148] In a preferred embodiment, polypeptide, polynucleotide, and antibody compositions of the invention are formulated in a biodegradable, polymeric drug delivery system, for example as described in U.S. Pat. Nos. 4,938,763; 5,278,201; 5,278,202; 5,324,519; 5,340,849; and 5,487,897 and in International Publication Numbers WO01/35929, WO00/24374, and WO00/06117 which are hereby incorporated by reference in their entirety. In specific preferred embodiments the polypeptide, polynucleotide, and antibody compositions of the invention are formulated using the ATRIGEL® Biodegradable System of Atrix Laboratories, Inc. (Fort Collins, Colo.).

[1149] Examples of biodegradable polymers which can be used in the formulation of polypeptide, polynucleotide, and antibody compositions, include but are not limited to, polylactides, polyglycolides, polycaprolactones, polyanhydrides, polyamides, polyurethanes, polyesteramides, polyorthoesters, polydioxanones, polyacetals, polyketals, polycarbonates, polyorthocarbonates, polyphosphazenes, polyhydroxybutyrates, polyhydroxyvalerates, polyalkylene oxalates, polyalkylene succinates, poly(malic acid), poly(amino acids), poly(methyl vinyl ether), poly(maleic anhydride), polyvinylpyrrolidone, polyethylene glycol, polyhydroxycellulose, chitin, chitosan, and copolymers, terpolymers, or combinations or mixtures of the above materials. The preferred polymers are those that have a lower degree of crystallization and are more hydrophobic. These polymers and copolymers are more soluble in the biocompatible solvents than the highly crystalline polymers such as polyglycolide and chitin which also have a high degree of hydrogen-bonding. Preferred materials with the desired solubility parameters are the polylactides, polycaprolactones, and copolymers of these with glycolide in which there are more amorphous regions to enhance solubility. In specific preferred embodiments, the biodegradable polymers which can be used in the formulation of polypeptide, polynucleotide, and antibody compositions are poly(lactide-co-glycolides). Polymer properties such as molecular weight, hydrophobicity, and lactide/glycolide ratio may be modified to obtain the desired polypeptide, polynucleotide, or antibody release profile (See, e.g., Ravivarapu et al., Journal of Pharmaceutical Sciences 89:732-741 (2000), which is hereby incorporated by reference in its entirety).

[1150] It is also preferred that the solvent for the biodegradable polymer be non-toxic, water miscible, and otherwise biocompatible. Examples of such solvents include, but are not limited to, N-methyl-2-pyrrolidone, 2-pyrrolidone, C2 to C6 alkanols, C1 to C15 alchohols, dils, triols, and tetraols such as ethanol, glycerine propylene glycol, butanol; C3 to C15 alkyl ketones such as acetone, diethyl ketone and methyl ethyl ketone; C3 to C15 esters such as methyl acetate, ethyl acetate, ethyl lactate; alkyl ketones such as methyl ethyl ketone, C1 to C15 amides such as dimethylformamide, dimethylacetamide and caprolactam; C3 to C20 ethers such as tetrahydrofuran, or solketal; tweens, triacetin, propylene carbonate, decylmethylsulfoxide, dimethyl sulfoxide, oleic acid, 1-dodecylazacycloheptan-2-one, Other preferred solvents are benzyl alchohol, benzyl benzoate, dipropylene glycol, tributyrin, ethyl oleate, glycerin, glycofural, isopropyl myristate, isopropyl palmitate, oleic acid, polyethylene glycol, propylene carbonate, and triethyl citrate. The most preferred solvents are N-methyl-2-pyrrolidone, 2-pyrrolidone, dimethyl sulfoxide, triacetin, and propylene carbonate because of the solvating ability and their compatibility.

[1151] Additionally, formulations comprising polypeptide, polynucleotide, and antibody compositions and a biodegradable polymer may also include release-rate modification agents and/or pore-forming agents. Examples of release-rate modification agents include, but are not limited to, fatty acids, triglycerides, other like hydrophobic compounds, organic solvents, plasticizing compounds and hydrophilic compounds. Suitable release rate modification agents include, for example, esters of mono-, di-, and tricarboxylic acids, such as 2-ethoxyethyl acetate, methyl acetate, ethyl acetate, diethyl phthalate, dimethyl phthalate, dibutyl phthalate, dimethyl adipate, dimethyl succinate, dimethyl oxalate, dimethyl citrate, triethyl citrate, acetyl tributyl citrate, acetyl triethyl citrate, glycerol triacetate, di(n-butyl) sebecate, and the like; polyhydroxy alcohols, such as propylene glycol, polyethylene glycol, glycerin, sorbitol, and the like; fatty acids; triesters of glycerol, such as triglycerides, epoxidized soybean oil, and other epoxidized vegetable oils; sterols, such as cholesterol; alcohols, such as C.sub.6-C.sub.12 alkanols, 2-ethoxyethanol. The release rate modification agent may be used singly or in combination with other such agents. Suitable combinations of release rate modification agents include, but are not limited to, glycerin/propylene glycol, sorbitol/glycerine, ethylene oxide/propylene oxide, butylene glycol/adipic acid, and the like. Preferred release rate modification agents include, but are not limited to, dimethyl citrate, triethyl citrate, ethyl heptanoate, glycerin, and hexanediol. Suitable pore-forming agents that may be used in the polymer composition include, but are not limited to, sugars such as sucrose and dextrose, salts such as sodium chloride and sodium carbonate, polymers such as hydroxylpropylcellulose, carboxymethylcellulose, polyethylene glycol, and polyvinylpyrrolidone. Solid crystals that will provide a defined pore size, such as salt or sugar, are preferred.

[1152] In specific preferred embodiments the polypeptide, polynucleotide, and antibody compositions of the invention are formulated using the BEMA™ BioErodible Mucoadhesive System, MCAT MucoCutaneous Absorption System, SMP™ Solvent MicroParticle System, or BCP™ BioCompatible Polymer System of Atrix Laboratories, Inc. (Fort Collins, Colo.).

[1153] Sustained-release Therapeutics also include liposomally entrapped Therapeutics of the invention (see generally, Langer, Science 249:1527-1533 (1990); Treat et al., in Liposomes in the Therapy of Infectious Disease and Cancer, Lopez-Berestein and Fidler (eds.), Liss, N.Y., pp. 317-327 and 353-365 (1989)). Liposomes containing the Therapeutic are prepared by methods known per se: DE 3,218,121; Epstein et al., Proc. Natl. Acad. Sci. (USA) 82:3688-3692 (1985); Hwang et al., Proc. Natl. Acad. Sci.(USA) 77:4030-4034 (1980); EP 52,322; EP 36,676; EP 88,046; EP 143,949; EP 142,641; Japanese Pat. Appl. 83-118008; U.S. Pat. Nos. 4,485,045 and 4,544,545; and EP 102,324. Ordinarily, the liposomes are of the small (about 200-800 Angstroms) unilamellar type in which the lipid content is greater than about 30 mol. percent cholesterol, the selected proportion being adjusted for the optimal Therapeutic.

[1154] In yet an additional embodiment, the Therapeutics of the invention are delivered by way of a pump (see Langer, supra; Sefton, CRC Crit. Ref. Biomed. Eng. 14:201 (1987); Buchwald et al., Surgery 88:507 (1980); Saudek et al., N. Engl. J. Med. 321:574 (1989)).

[1155] Other controlled release systems are discussed in the review by Langer (Science 249:1527-1533 (1990)).

[1156] For parenteral administration, in one embodiment, the Therapeutic is formulated generally by mixing it at the desired degree of purity, in a unit dosage injectable form (solution, suspension, or emulsion), with a pharmaceutically acceptable carrier, i.e., one that is non-toxic to recipients at the dosages and concentrations employed and is compatible with other ingredients of the formulation. For example, the formulation preferably does not include oxidizing agents and other compounds that are known to be deleterious to the Therapeutic.

[1157] Generally, the formulations are prepared by contacting the Therapeutic uniformly and intimately with liquid carriers or finely divided solid carriers or both. Then, if necessary, the product is shaped into the desired formulation. Preferably the carrier is a parenteral carrier, more preferably a solution that is isotonic with the blood of the recipient. Examples of such carrier vehicles include water, saline, Ringer's solution, and dextrose solution. Non-aqueous vehicles such as fixed oils and ethyl oleate are also useful herein, as well as liposomes.

[1158] The carrier suitably contains minor amounts of additives such as substances that enhance isotonicity and chemical stability. Such materials are non-toxic to recipients at the dosages and concentrations employed, and include buffers such as phosphate, citrate, succinate, acetic acid, and other organic acids or their salts; antioxidants such as ascorbic acid; low molecular weight (less than about ten residues) polypeptides, e.g., polyarginine or tripeptides; proteins, such as serum albumin, gelatin, or immunoglobulins; hydrophilic polymers such as polyvinylpyrrolidone; amino acids, such as glycine, glutamic acid, aspartic acid, or arginine; monosaccharides, disaccharides, and other carbohydrates including cellulose or its derivatives, glucose, manose, or dextrins; chelating agents such as EDTA; sugar alcohols such as mannitol or sorbitol; counterions such as sodium; and/or nonionic surfactants such as polysorbates, poloxamers, or PEG.

[1159] The Therapeutic is typically formulated in such vehicles at a concentration of about 0.1 mg/ml to 100 mg/ml, preferably 1-10 mg/ml, at a pH of about 3 to 8. It will be understood that the use of certain of the foregoing excipients, carriers, or stabilizers will result in the formation of polypeptide salts.

[1160] Any pharmaceutical used for therapeutic administration can be sterile. Sterility is readily accomplished by filtration through sterile filtration membranes (e.g., 0.2 micron membranes). Therapeutics generally are placed into a container having a sterile access port, for example, an intravenous solution bag or vial having a stopper pierceable by a hypodermic injection needle.

[1161] Therapeutics ordinarily will be stored in unit or multi-dose containers, for example, sealed ampoules or vials, as an aqueous solution or as a lyophilized formulation for reconstitution. As an example of a lyophilized formulation, 10-ml vials are filled with 5 ml of sterile-filtered 1% (w/v) aqueous Therapeutic solution, and the resulting mixture is lyophilized. The infusion solution is prepared by reconstituting the lyophilized Therapeutic using bacteriostatic Water-for-Injection.

[1162] The invention also provides a pharmaceutical pack or kit comprising one or more containers filled with one or more of the ingredients of the Therapeutics of the invention. Associated with such container(s) can be a notice in the form prescribed by a governmental agency regulating the manufacture, use or sale of pharmaceuticals or biological products, which notice reflects approval by the agency of manufacture, use or sale for human administration. In addition, the Therapeutics may be employed in conjunction with other therapeutic compounds.

[1163] The Therapeutics of the invention may be administered alone or in combination with adjuvants. Adjuvants that may be administered with the Therapeutics of the invention include, but are not limited to, alum, alum plus deoxycholate (ImmunoAg), MTP-PE (Biocine Corp.), QS21 (Genentech, Inc.), BCG (e.g., THERACYS®), MPL and nonviable prepartions of Corynebacterium parvum. In a specific embodiment, Therapeutics of the invention are administered in combination with alum. In another specific embodiment, Therapeutics of the invention are administered in combination with QS-21. Further adjuvants that may be administered with the Therapeutics of the invention include, but are not limited to, Monophosphoryl lipid immunomodulator, AdjuVax 100a, QS-21, QS-18, CRL1005, Aluminum salts, MF-59, and Virosomal adjuvant technology. Vaccines that may be administered with the Therapeutics of the invention include, but are not limited to, vaccines directed toward protection against MMR (measles, mumps, rubella), polio, varicella, tetanus/diptheria, hepatitis A, hepatitis B, haemophilus influenzae B, whooping cough, pneumonia, influenza, Lyme's Disease, rotavirus, cholera, yellow fever, Japanese encephalitis, poliomyelitis, rabies, typhoid fever, and pertussis. Combinations may be administered either concomitantly, e.g., as an admixture, separately but simultaneously or concurrently; or sequentially. This includes presentations in which the combined agents are administered together as a therapeutic mixture, and also procedures in which the combined agents are administered separately but simultaneously, e.g., as through separate intravenous lines into the same individual. Administration “in combination” further includes the separate administration of one of the compounds or agents given first, followed by the second.

[1164] The Therapeutics of the invention may be administered alone or in combination with other therapeutic agents. Therapeutic agents that may be administered in combination with the Therapeutics of the invention, include but not limited to, chemotherapeutic agents, antibiotics, steroidal and non-steroidal anti-inflammatories, conventional immunotherapeutic agents, and/or therapeutic treatments described below. Combinations may be administered either concomitantly, e.g., as an admixture, separately but simultaneously or concurrently; or sequentially. This includes presentations in which the combined agents are administered together as a therapeutic mixture, and also procedures in which the combined agents are administered separately but simultaneously, e.g., as through separate intravenous lines into the same individual. Administration “in combination” further includes the separate administration of one of the compounds or agents given first, followed by the second.

[1165] In one embodiment, the Therapeutics of the invention are administered in combination with an anticoagulant. Anticoagulants that may be administered with the compositions of the invention include, but are not limited to, heparin, low molecular weight heparin, warfarin sodium (e.g., COUMADIN®), dicumarol, 4-hydroxycoumarin, anisindione (e.g., MIRADON™), acenocoumarol (e.g., nicoumalone, SINTHROME™), indan-1,3-dione, phenprocoumon (e.g., MARCUMAR™), ethyl biscoumacetate (e.g., TROMEXAN™), and aspirin. In a specific embodiment, compositions of the invention are administered in combination with heparin and/or warfarin. In another specific embodiment, compositions of the invention are administered in combination with warfarin. In another specific embodiment, compositions of the invention are administered in combination with warfarin and aspirin. In another specific embodiment, compositions of the invention are administered in combination with heparin. In another specific embodiment, compositions of the invention are administered in combination with heparin and aspirin.

[1166] In another embodiment, the Therapeutics of the invention are administered. in combination with thrombolytic drugs. Thrombolytic drugs that may be administered with the compositions of the invention include, but are not limited to, plasminogen, lys-plasminogen, alpha2-antiplasmin, streptokinae (e.g., KABIKINASE™), antiresplace (e.g., EMINASE™), tissue plasminogen activator (t-PA, altevase, ACTIVASE™), urokinase (e.g., ABBOKINASE™), sauruplase, (Prourokinase, single chain urokinase), and aminocaproic acid (e.g., AMICAR™). In a specific embodiment, compositions of the invention are administered in combination with tissue plasminogen activator and aspirin.

[1167] In another embodiment, the Therapeutics of the invention are administered in combination with antiplatelet drugs. Antiplatelet drugs that may be administered with the compositions of the invention include, but are not limited to, aspirin, dipyridamole (e.g., PERSANTINE™), and ticlopidine (e.g., TICLID™).

[1168] In specific embodiments, the use of anti-coagulants, thrombolytic and/or antiplatelet drugs in combination with Therapeutics of the invention is contemplated for the prevention, diagnosis, and/or treatment of thrombosis, arterial thrombosis, venous thrombosis, thromboembolism, pulmonary embolism, atherosclerosis, myocardial infarction, transient ischemic attack, unstable angina. In specific embodiments, the use of anticoagulants, thrombolytic drugs and/or antiplatelet drugs in combination with Therapeutics of the invention is contemplated for the prevention of occulsion of saphenous grafts, for reducing the risk of periprocedural thrombosis as might accompany angioplasty procedures, for reducing the risk of stroke in patients with atrial fibrillation including nonrheumatic atrial fibrillation, for reducing the risk of embolism associated with mechanical heart valves and or mitral valves disease. Other uses for the therapeutics of the invention, alone or in combination with antiplatelet, anticoagulant, and/or thrombolytic drugs, include, but are not limited to, the prevention of occlusions in extracorporeal devices (e.g., intravascular canulas, vascular access shunts in hemodialysis patients, hemodialysis machines, and cardiopulmonary bypass machines).

[1169] In certain embodiments, Therapeutics of the invention are administered in combination with antiretroviral agents, nucleoside/nucleotide reverse transcriptase inhibitors (NRTIs), non-nucleoside reverse transcriptase inhibitors (NNRTIs), and/or protease inhibitors (PIs). NRTIs that may be administered in combination with the Therapeutics of the invention, include, but are not limited to, RETROVIR™ (zidovudine/AZT), VIDEX™ (didanosine/ddI), HIVID™ (zalcitabine/ddC), ZERITυ (stavudine/d4T), EPIVIR™ (lamivudine/3TC), and COMBIVIR™ (zidovudine/lamivudine). NNRTIs that may be administered in combination with the Therapeutics of the invention, include, but are not limited to, VIRAMUNE™ (nevirapine), RESCRIPTOR™ (delavirdine), and SUSTIVA™ (efavirenz). Protease inhibitors that may be administered in combination with the Therapeutics of the invention, include, but are not limited to, CRIXIVAN™ (indinavir), NORVIR™ (ritonavir), INVIRASE™ (saquinavir), and VIRACEPT™ (nelfinavir). In a specific embodiment, antiretroviral agents, nucleoside reverse transcriptase inhibitors, non-nucleoside reverse transcriptase inhibitors, and/or protease inhibitors may be used in any combination with Therapeutics of the invention to treat AIDS and/or to prevent or treat HIV infection.

[1170] Additional NRTIs include LODENOSINE™ (F-ddA; an acid-stable adenosine NRTI; Triangle/Abbott; COVIRACIL™ (emtricitabine/FTC; structurally related to lamivudine (3TC) but with 3- to 10-fold greater activity in vitro; Triangle/Abbott); dOTC (BCH-10652, also structurally related to lamivudine but retains activity against a substantial proportion of larmivudine-resistant isolates; Biochem Pharrna); Adefovir (refused approval for anti-HIV therapy by FDA; Gilead Sciences); PREVEON® (Adefovir Dipivoxil, the active prodrug of adefovir; its active form is PMEA-pp); TENOFOVIR™ (bis-POC PMPA, a PMPA prodrug; Gilead); DAPD/DXG (active metabolite of DAPD; Triangle/Abbott); D-D4FC (related to 3TC, with activity against AZT/3TC-resistant virus); GW420867X (Glaxo Wellcome); ZIAGEN™ (abacavir/159U89; Glaxo Wellcome Inc.); CS-87 (3′azido-2′,3 ′-dideoxyuridine; WO 99/66936); and S-acyl-2-thioethyl (SATE)-bearing prodrug forms of β-L-FD4C and β-L-FddC (WO 98/17281).

[1171] Additional NNRTIs include COACTINON™ (Emivirine/MKC-442, potent NNRTI of the HEPT class; Triangle/Abbott); CAPRAVIRINE™ (AG-1549/S-1153, a next generation NNRTI with activity against viruses containing the K103N mutation; Agouron); PNU-142721 (has 20- to 50-fold greater activity than its predecessor delavirdine and is active against K103N mutants; Pharmacia & Upjohn); DPC-961 and DPC-963 (second-generation derivatives of efavirenz, designed to be active against viruses with the K103N mutation; DuPont); GW-420867X (has 25-fold greater activity than HBY097 and is active against K103N mutants; Glaxo Wellcome); CALANOLIDE A (naturally occurring agent from the latex tree; active against viruses containing either or both the Y181C and K103N mutations); and Propolis (WO 99/49830).

[1172] Additional protease inhibitors include LOPINAVIR™ (ABT378/r; Abbott Laboratories); BMS-232632 (an azapeptide; Bristol-Myres Squibb); TIPRANAVIR™ (PNU-140690, a non-peptic dihydropyrone; Pharmacia & Upjohn); PD-178390 (a nonpeptidic dihydropyrone; Parke-Davis); BMS 232632 (an azapeptide; Bristol-Myers Squibb); L-756,423 (an indinavir analog; Merck); DMP-450 (a cyclic urea compound; Avid & DuPont); AG-1776 (a peptidomimetic with in vitro activity against protease inhibitor-resistant viruses; Agouron); VX-175/GW-433908 (phosphate prodrug of amprenavir; Vertex & Glaxo Welcome); CGP61755 (Ciba); and AGENERASE™ (amprenavir; Glaxo Wellcome Inc.).

[1173] Additional antiretroviral agents include fusion inhibitors/gp41 binders. Fusion inhibitors/gp41 binders include T-20 (a peptide from residues 643-678 of the HIV gp41 transmembrane protein ectodomain which binds to gp41 in its resting state and prevents transformation to the fusogenic state; Trimeris) and T-1249 (a second-generation fusion inhibitor; Trimeris).

[1174] Additional antiretroviral agents include fusion inhibitors/chemokine receptor antagonists. Fusion inhibitors/chemokine receptor antagonists include CXCR4 antagonists such as AMD 3100 (a bicyclam), SDF-1 and its analogs, and ALX40-4C (a cationic peptide), T22 (an 18 amino acid peptide; Trimeris) and the T22 analogs T134 and T140; CCR5 antagonists such as RANTES (9-68), AOP-RANTES, NNY-RANTES, and TAK-779; and CCR5/CXCR4 antagonists such as NSC 651016 (a distamycin analog). Also included are CCR2B, CCR3, and CCR6 antagonists. Chemokine recpetor agonists such as RANTES, SDF-1, MIP-1α, MIP-1β, etc., may also inhibit fusion.

[1175] Additional antiretroviral agents include integrase inhibitors. Integrase inhibitors include dicaffeoylquinic (DFQA) acids; L-chicoric acid (a dicaffeoyltartaric (DCTA) acid); quinalizarin (QLC) and related anthraquinones; ZINTEVIR™ (AR 177, an oligonucleotide that probably acts at cell surface rather than being a true integrase inhibitor; Arondex); and naphthols such as those disclosed in WO 98/50347.

[1176] Additional antiretroviral agents include hydroxyurea-like compunds such as BCX-34 (a purine nucleoside phosphorylase inhibitor; Biocryst); ribonucleotide reductase inhibitors such as DIDOX™ (Molecules for Health); inosine monophosphate dehydrogenase (IMPDH) inhibitors sucha as VX-497 (Vertex); and mycopholic acids such as CellCept (mycophenolate mofetil; Roche).

[1177] Additional antiretroviral agents include inhibitors of viral integrase, inhibitors of viral genome nuclear translocation such as arylene bis(methylketone) compounds; inhibitors of HIV entry such as AOP-RANTES, NNY-RANTES, RANTES-IgG fusion protein, soluble complexes of RANTES and glycosaminoglycans (GAG), and AMD-3100; nucleocapsid zinc finger inhibitors such as dithiane compounds; targets of HIV Tat and Rev; and pharmacoenhancers such as ABT-378.

[1178] Other antiretroviral therapies and adjunct therapies include cytokines and lymphokines such as MIP-1α, MIP-1β, SDF-1α, IL-2, PROLEUKIN™ (aldesleukin/L2-7001; Chiron), IL-4, IL-10, IL-12, and IL-13; interferons such as IFN-α2a; antagonists of TNFs, NFκB, GM-CSF, M-CSF, and IL-10; agents that modulate immune activation such as cyclosporin and prednisone; vaccines such as Remune™ (HIV Immunogen), APL 400-003 (Apollon), recombinant gp120 and fragments, bivalent (B/E) recombinant envelope glycoprotein, rgp120CM235, MN rgp120, SF-2 rgp120, gp120/soluble CD4 complex, Delta JR-FL protein, branched synthetic peptide derived from discontinuous gp120 C3/C4 domain, fusion-competent immunogens, and Gag, Pol, Nef, and Tat vaccines; gene-based therapies such as genetic suppressor elements (GSEs; WO 98/54366), and intrakines (genetically modified CC chemokines targetted to the ER to block surface expression of newly synthesized CCR5 (Yang et al., PNAS 94:11567-72 (1997); Chen et al., Nat. Med. 3:1110-16 (1997)); antibodies such as the anti-CXCR4 antibody 12G5, the anti-CCR5 antibodies 2D7, 5C7, PA8, PA9, PA10, PA11, PA12, and PA14, the anti-CD4 antibodies Q4120 and RPA-T4, the anti-CCR3 antibody 7B 11, the anti-gp120 antibodies 17b, 48d, 447-52D, 257-D, 268-D and 50.1, anti-Tat antibodies, anti-TNF-α antibodies, and monoclonal antibody 33A; aryl hydrocarbon (AH) receptor agonists and antagonists such as TCDD, 3,3′,4,4′,5-pentachlorobiphenyl, 3,3′,4,4′-tetrachlorobiphenyl, and α-naphthoflavone (WO 98/30213); and antioxidants such as γ-L-glutamyl-L-cysteine ethyl ester (γ-GCE; WO 99/56764).

[1179] In a further embodiment, the Therapeutics of the invention are administered in combination with an antiviral agent. Antiviral agents that may be administered with the Therapeutics of the invention include, but are not limited to, acyclovir, ribavirin, amantadine, and remantidine.

[1180] In other embodiments, Therapeutics of the invention may be administered in combination with anti-opportunistic infection agents. Anti-opportunistic agents that may be administered in combination with the Therapeutics of the invention; include, but are not limited to, TRIMETHOPRIM-SULFAMETHOXAZOLE™, DAPSONE™, PENTAMIDINE™, ATOVAQUONE™, ISONJAZID™, RIFAMPIN™, PYRAZINAMIDE™, ETHAMBUTOL™, RIFABUTIN™, CLARITHROMYCIN™, AZITHROMYCIN™, GANCICLOVIR™, FOSCARNETY™, CIDOFOVIR™, FLUCONAZOLE™, ITRACONAZOLE™, KETOCONAZOLE™, ACYCLOVIR™, FAMCICOLVIR™, PYRIMETHAMINE™, LEUCOVORIN™, NEUPOGEN™ (filgrastim/G-CSF), and LEUKINE ™ (sargramostim/GM-CSF). In a specific embodiment, Therapeutics of the invention are used in any combination with TRIMETHOPRIM-SULFAMETHOXAZOLE™, DAPSONE™, PENTAMIDINE™, and/or ATOVAQUONE™ to prophylactically treat or prevent an opportunistic Pneumocystis carinii pneumonia infection. In another specific embodiment, Therapeutics of the invention are used in any combination with ISONIAZID™, RIFAMPIN™, PYRAZINAMIDE™, and/or ETHAMBUTOL™ to prophylactically treat or prevent an opportunistic Mycobacterium avium complex infection. In another specific embodiment, Therapeutics of the invention are used in any combination with RIFABUTIN™, CLARITHROMYCIN™, and/or AZITHROMYCIN™ to prophylactically treat or prevent an opportunistic Mycobacterium tuberculosis infection. In another specific embodiment, Therapeutics of the invention are used in any combination with GANCICLOVIR™, FOSCARNE™, and/or CIDOFOVIR™ to prophylactically treat or prevent an opportunistic cytomegalovirus infection. In another specific embodiment, Therapeutics of the invention are used in any combination with FLUCONAZOLE™, ITRACONAZOLE™, and/or KETOCONAZOLE™ to prophylactically treat or prevent an opportunistic fungal infection. In another specific embodiment, Therapeutics of the invention are used in any combination with ACYCLOVIR™ and/or FAMCICOLVIR™ to prophylactically treat or prevent an opportunistic herpes simplex virus type I and/or type II infection. In another specific embodiment, Therapeutics of the invention are used in any combination with PYRIMETHAMINE™ and/or LEUCOVORIN™ to prophylactically treat or prevent an opportunistic Toxoplasma gondii infection. In another specific embodiment, Therapeutics of the invention are used in any combination with LEUCOVORIN™ and/or NEUPOGEN™ to prophylactically treat or prevent an opportunistic bacterial infection.

[1181] In a further embodiment, the Therapeutics of the invention are administered in combination with an antibiotic agent. Antibiotic agents that may be admninistered with the Therapeutics of the invention include, but are not limited to, amoxicillin, beta-lactamases, aminoglycosides, beta-lactam (glycopeptide), beta-lactarnases, Clindamycin, chloramphenicol, cephalosporins, ciprofloxacin, erythromycin, fluoroquinolones, macrolides, metronidazole, penicillins, quinolones, rapamycin, rifampin, streptomycin, sulfonamide, tetracyclines, trimethoprim, trimethoprim-sulfamethoxazole, and vancomycin.

[1182] In other embodiments, the Therapeutics of the invention are administered in combination with immunestimulants. Immunostimulants that may be administered in combination with the Therapeutics of the invention include, but are not limited to, levamisole (e.g., ERGAMISOL™), isoprinosine (e.g. INOSIPLEX™), interferons (e.g. interferon alpha), and interleukins (e.g., IL-2).

[1183] In other embodiments, Therapeutics of the invention are administered in combination with immunosuppressive agents. Irmunosuppressive agents that may be administered in combination with the Therapeutics of the invention include, but are not limited to, steroids, cyclosporine, cyclosporine analogs, cyclophosphamide methylprednisone, prednisone, azathioprine, FK-506, 15-deoxyspergualin, and other immunosuppressive agents that act by suppressing the function of responding T cells. Other immunosuppressive agents that may be administered in combination with the Therapeutics of the invention include, but are not limited to, prednisolone, methotrexate, thalidomide, methoxsalen, rapamycin, leflunomide, mizoribine (BREDININ™), brequinar, deoxyspergualin, and azaspirane (SKF 105685), ORTHOCLONE OKT® 3 (muromonab-CD3), SANDIMMUNE™, NEORAL™, SANGDYA™ (cyclosporine), PROGRAF® (FK506, tacrolimus), CELLCEPT® (mycophenolate motefil, of which the active metabolite is mycophenolic acid), IMURAN™ (azathioprine), glucocorticosteroids, adrenocortical steroids such as DELTASONE™ (prednisone) and HYDELTRASOL™ (prednisolone), FOLEX™ and MEXATE™ (methotrxate), OXSORALEN-ULTRA™ (methoxsalen) and RAPAMUNE™ (sirolimus). In a specific embodiment, immunosuppressants may be used to prevent rejection of organ or bone marrow transplantation.

[1184] In an additional embodiment, Therapeutics of the invention are administered alone or in combination with one or more intravenous immune globulin preparations. Intravenous immune globulin preparations that may be administered with the Therapeutics of the invention include, but not limited to, GAMMAR™, IVEEGAM™, SANDOGLOBULIN™, GAMMAGARD S/D™, ATGAM™ (antithymocyte glubulin), and GAMIMUNE™. In a specific embodiment, Therapeutics of the invention are administered in combination with intravenous immune globulin preparations in transplantation therapy (e.g., bone marrow transplant).

[1185] In certain embodiments, the Therapeutics of the invention are administered alone or in combination with an anti-inflammatory agent. Anti-inflammatory agents that may be administered with the Therapeutics of the invention include, but are not limited to, corticosteroids (e.g. betamethasone, budesonide, cortisone, dexamethasone, hydrocortisone, methylprednisolone, prednisolone, prednisone, and triamcinolone), nonsteroidal anti-inflammatory drugs (e.g., diclofenac, diflunisal, etodolac, fenoprofen, floctafenine, flurbiprofen, ibuprofen, indomethacin, ketoprofen, meclofenamate, mefenamic acid, meloxicam, nabumetone, naproxen, oxaprozin, phenylbutazone, piroxicam, sulindac, tenoxicam, tiaprofenic acid, and tolmetin.), as well as antihistamines, aminoarylcarboxylic acid derivatives, arylacetic acid derivatives, arylbutyric acid derivatives, arylcarboxylic acids, arylpropionic acid derivatives, pyrazoles, pyrazolones, salicylic acid derivatives, thiazinecarboxamides, e-acetamidocaproic acid, S-adenosylmethionine, 3-amino-4-hydroxybutyric acid, amixetrine, bendazac, benzydamine, bucolome, difenpiramide, ditazol, emorfazone, guaiazulene, nabumetone, nimesulide, orgotein, oxaceprol, paranyline, perisoxal, pifoxime, proquazone, proxazole, and tenidap.

[1186] In an additional embodiment, the compositions of the invention are administered alone or in combination with an anti-angiogenic agent. Anti-angiogenic agents that may be administered with the compositions of the invention include, but are not limited to, Angiostatin (Entremed, Rockville, Md.), Troponin-1 (Boston Life Sciences, Boston, Mass.), anti-Invasive Factor, retinoic acid and derivatives thereof, paclitaxel (Taxol), Suramin, Tissue Inhibitor of Metalloproteinase-1, Tissue Inhibitor of Metalloproteinase-2, VEGI, Plasminogen Activator Inhibitor-1, Plasminogen Activator Inhibitor-2, and various forms of the lighter “d group” transition metals.

[1187] Lighter “d group” transition metals include, for example, vanadium, molybdenum, tungsten, titanium, niobium, and tantalum species. Such transition metal species may form transition metal complexes. Suitable complexes of the above-mentioned transition metal species include oxo transition metal complexes.

[1188] Representative examples of vanadium complexes include oxo vanadium complexes such as vanadate and vanadyl complexes. Suitable vanadate complexes include metavanadate and orthovanadate complexes such as, for example, ammonium metavanadate, sodium metavanadate, and sodium orthovanadate. Suitable vanadyl complexes include, for example, vanadyl acetylacetonate and vanadyl sulfate including vanadyl sulfate hydrates such as vanadyl sulfate mono- and trihydrates.

[1189] Representative examples of tungsten and molybdenum complexes also include oxo complexes. Suitable oxo tungsten complexes include tungstate and tungsten oxide complexes. Suitable tungstate complexes include ammonium tungstate, calcium tungstate, sodium tungstate dihydrate, and tungstic acid. Suitable tungsten oxides include tungsten (IV) oxide and tungsten (VI) oxide. Suitable oxo molybdenum complexes include molybdate, molybdenum oxide, and molybdenyl complexes. Suitable molybdate complexes include ammonium molybdate and its hydrates, sodium molybdate and its hydrates, and potassium molybdate and its hydrates. Suitable molybdenum oxides include molybdenum (VI) oxide, molybdenum (VI) oxide, and molybdic acid. Suitable molybdenyl complexes include, for example, molybdenyl acetylacetonate. Other suitable tungsten and molybdenum complexes include hydroxo derivatives derived from, for example, glycerol, tartaric acid, and sugars.

[1190] A wide variety of other anti-angiogenic factors may also be utilized within the context of the present invention. Representative examples include, but are not limited to, platelet factor 4; protamine sulphate; sulphated chitin derivatives (prepared from queen crab shells), (Murata et al., Cancer Res. 51:22-26, (1991)); Sulphated Polysaccharide Peptidoglycan Complex (SP-PG) (the function of this compound may be enhanced by the presence of steroids such as estrogen, and tamoxifen citrate); Staurosporine; modulators of matrix metabolism, including for example, proline analogs, cishydroxyproline, d,L-3,4-dehydroproline, Thiaproline, alpha,alpha-dipyridyl, aminopropionitrile fumarate; 4-propyl-5-(4-pyridinyl)-2(3H)-oxazolone; Methotrexate; Mitoxantrone; Heparin; Interferons; 2 Macroglobulin-serum; ChIMP-3 (Pavloff et al., J. Bio. Chem. 267:17321-17326, (1992)); Chymostatin (Tomkinson et al., Biochem J. 286:475-480, (1992)); Cyclodextrin Tetradecasulfate; Eponemycin; Camptothecin; Fumagillin (Ingber et al., Nature 348:555-557, (1990)); Gold Sodium Thiomalate (“GST”; Matsubara and Ziff, J. Clin. Invest. 79:1440-1446, (1987)); anticollagenase-serum; alpha2-antiplasmin (Holmes et al., J. Biol. Chem. 262(4):1659-1664, (1987)); Bisantrene (National Cancer Institute); Lobenzarit disodium (N-(2)-carboxyphenyl-4-chloroanthronilic acid disodium or “CCA”; (Takeuchi et al., Agents Actions 36:312-316, (1992)); and metalloproteinase inhibitors such as BB94.

[1191] Additional anti-angiogenic factors that may also be utilized within the context of the present invention include Thalidomide, (Celgene, Warren, N.J.); Angiostatic steroid; AGM-1470 (H. Brem and J. Folkman J Pediatr. Surg. 28:445-51 (1993)); an integrin alpha v beta 3 antagonist (C. Storgard et al., J Clin. Invest. 103:47-54 (1999)); carboxynaminolmidazole; Carboxyamidotriazole (CAI) (National Cancer Institute, Bethesda, Md.); Conbretastatin A-4 (CA4P) (OXiGENE, Boston, Mass.); Squalamine (Magainin Pharmaceuticals, Plymouth Meeting, Pa.); TNP-470, (Tap Pharmaceuticals, Deerfield, Ill.); ZD-0101 AstraZeneca (London, UK); APRA (CT2584); Benefin, Byrostatin-1 (SC339555); CGP41251 (PKC 412); CM101; Dexrazoxane (ICRF187); DMXAA; Endostatin; Flavopridiol; Genestein; GTE; ImmTher; Iressa (ZD1839); Octreotide (Somatostatin); Panretin; Penacillamine; Photopoint; PI-88; Prinomastat (AG-3340) Purlytin; Suradista (FCE26644); Tamoxifen (Nolvadex); Tazarotene; Tetrathiomolybdate; Xeloda (Capecitabine); and 5-Fluorouracil.

[1192] Anti-angiogenic agents that may be administed in combination with the compounds of the invention may work through a variety of mechanisms including, but not limited to, inhibiting proteolysis of the extracellular matrix, blocking the function of endothelial cell-extracellular matrix adhesion molecules, by antagonizing the function of angiogenesis inducers such as growth factors, and inhibiting integrin receptors expressed on proliferating endothelial cells. Examples of anti-angiogenic inhibitors that interfere with extracellular matrix proteolysis and which may be administered in combination with the compositons of the invention include, but are not Imited to, AG-3340 (Agouron, La Jolla, Calif.), BAY-12-9566 (Bayer, West Haven, Conn.), BMS-275291 (Bristol Myers Squibb, Princeton, N.J.), CGS-27032A (Novartis, East Hanover, N.J.), Marimastat (British Biotech, Oxford, UK), and Metastat (Aetema, St-Foy, Quebec). Examples of anti-angiogenic inhibitors that act by blocking the function of endothelial cell-extracellular matrix adhesion molecules and which may be administered in combination with the compositons of the invention include, but are not Imited to, EMD-121974 (Merck KcgaA Darmstadt, Germany) and Vitaxin (Ixsys, La Jolla, Calif./Medimmune, Gaithersburg, Md.). Examples of anti-angiogenic agents that act by directly antagonizing or inhibiting angiogenesis inducers and which may be administered in combination with the compositons of the invention include, but are not lmited to, Angiozyme (Ribozyme, Boulder, Colo.), Anti-VEGF antibody (Genentech, S. San Francisco, Calif.), PTK-787/ZK-225846 (Novartis, Basel, Switzerland), SU-101 (Sugen, S. San Francisco, Calif.), SU-5416 (Sugen/ Pharmacia Upjohn, Bridgewater, N.J.), and SU-6668 (Sugen). Other anti-angiogenic agents act to indirectly inhibit angiogenesis. Examples of indirect inhibitors of angiogenesis which may be administered in combination with the compositons of the invention include, but are not limited to, IM-862 (Cytran, Kirkland, Wash.), Interferon-alpha, IL-12 (Roche, Nutley, N.J.), and Pentosan polysulfate (Georgetown University, Washington, D.C.).

[1193] In particular embodiments, the use of compositions of the invention in combination with anti-angiogenic agents is contemplated for the treatment, prevention, and/or amelioration of an autoimmune disease, such as for example, an autoimmune disease described herein.

[1194] In a particular embodiment, the use of compositions of the invention in combination with anti-angiogenic agents is contemplated for the treatment, prevention, and/or amelioration of arthritis. In a more particular embodiment, the use of compositions of the invention in combination with anti-angiogenic agents is contemplated for the treatment, prevention, and/or amelioration of rheumatoid arthritis.

[1195] In another embodiment, the polynucleotides encoding a polypeptide of the present invention are administered in combination with an angiogenic protein, or polynucleotides encoding an angiogenic protein. Examples of angiogenic proteins that may be administered with the compositions of the invention include, but are not limited to, acidic and basic fibroblast growth factors, VEGF-1, VEGF-2, VEGF-3, epidermal growth factor alpha and beta, platelet-derived endothelial cell growth factor, platelet-derived growth factor, tumor necrosis factor alpha, hepatocyte growth factor, insulin-like growth factor, colony stimulating factor, macrophage colony stimulating factor, granulocyte/macrophage colony stimulating factor, and nitric oxide synthase.

[1196] In additional embodiments, compositions of the invention are administered in combination with a chemotherapeutic agent. Chemotherapeutic agents that may be administered with the Therapeutics of the invention include, but are not limited to alkylating agents such as nitrogen mustards (for example, Mechlorethamine, cyclophosphamide, Cyclophosphamide Ifosfamide, Melphalan (L-sarcolysin), and Chlorambucil), ethylenimines and methylmelamines (for example, Hexamethylmelamine and Thiotepa), alkyl sulfonates (for example, Busulfan), nitrosoureas (for example, Carmustine (BCNU), Lomustine (CCNU), Semustine (methyl-CCNU), and Streptozocin (streptozotocin)), triazenes (for example, Dacarbazine (DTIC; dimethyltriazenoimidazolecarboxamide)), folic acid analogs (for example, Methotrexate (amethopterin)), pyrimidine analogs (for example, Fluorouacil (5-fluorouracil; 5-FU), Floxuridine (fluorodeoxyuridine; FudR), and Cytarabine (cytosine arabinoside)), purine analogs and related inhibitors (for example, Mercaptopurine (6-mercaptopurine; 6-MP), Thioguanine (6-thioguanine; TG), and Pentostatin (2 -deoxycoformycin)), vinca alkaloids (for example, Vinblastine (VLB, vinblastine sulfate)) and Vincristine (vincristine sulfate)), epipodophyllotoxins (for example, Etoposide and Teniposide), antibiotics (for example, Dactinomycin (actinomycin D), Daunorubicin (daunomycin; rubidomycin), Doxorubicin, Bleomycin, Plicamycin (mithramycin), and Mitomycin (mitomycin C), enzymes (for example, L-Asparaginase), biological response modifiers (for example, Interferon-alpha and interferon-alpha-2b), platinum coordination compounds (for example, Cisplatin (cis-DDP) and Carboplatin), anthracenedione (Mitoxantrone), substituted ureas (for example, Hydroxyurea), methylhydrazine derivatives (for example, Procarbazine (N-methylhydrazine; MIH), adrenocorticosteroids (for example, Prednisone), progestins (for example, Hydroxyprogesterone caproate, Medroxyprogesterone, Medroxyprogesterone acetate, and Megestrol acetate), estrogens (for example, Diethylstilbestrol (DES), Diethylstilbestrol diphosphate, Estradiol, and Ethinyl estradiol), antiestrogens (for example, Tamoxifen), androgens (Testosterone proprionate, and Fluoxymesterone), antiandrogens (for example, Flutamide), gonadotropin-releasing horomone analogs (for example, Leuprolide), other hormones and hormone analogs (for example, methyltestosterone, estramustine, estramustine phosphate sodium, chlorotrianisene, and testolactone), and others (for example, dicarbazine, glutamic acid, and mitotane).

[1197] In one embodiment, the compositions of the invention are administered in combination with one or more of the following drugs: infliximab (also known as Remicade™ Centocor, Inc.), Trocade (Roche, RO-32-3555), Leflunomide (also known as Arava™ from Hoechst Marion Roussel), Kineret™ (an IL-1 Receptor antagonist also known as Anakinra from Amgen, Inc.)

[1198] In a specific embodiment, compositions of the invention are administered in combination with CHOP (cyclophosphamide, doxorubicin, vincristine, and prednisone) or combination of one or more of the components of CHOP. In one embodiment, the compositions of the invention are administered in combination with anti-CD20 antibodies, human monoclonal anti-CD20 antibodies. In another embodiment, the compositions of the invention are administered in combination with anti-CD20 antibodies and CHOP, or anti-CD20 antibodies and any combination of one or more of the components of CHOP, particularly cyclophosphamide and/or prednisone. In a specific embodiment, compositions of the invention are administered in combination with Rituximab. In a further embodiment, compositions of the invention are administered with Rituximab and CHOP, or Rituximab and any combination of one or more of the components of CHOP, particularly cyclophosphamide and/or prednisone. In a specific embodiment, compositions of the invention are administered in combination with tositumomab. In a further embodiment, compositions of the invention are administered with tositumomab and CHOP, or tositumomab and any combination of one or more of the components of CHOP, particularly cyclophosphamide and/or prednisone. The anti-CD20 antibodies may optionally be associated with radioisotopes, toxins or cytotoxic prodrugs.

[1199] In another specific embodiment, the compositions of the invention are administered in combination Zevalin™. In a further embodiment, compositions of the invention are administered with Zevalin™ and CHOP, or Zevalin™ and any combination of one or more of the components of CHOP, particularly cyclophosphamide and/or prednisone. Zevalin™ may be associated with one or more radisotopes. Particularly preferred isotopes are ⁹⁰Y and ¹¹¹In.

[1200] In an additional embodiment, the Therapeutics of the invention are administered in combination with cytokines. Cytokines that may be administered with the Therapeutics of the invention include, but are not limited to, IL2, IL3, IL4, IL5, IL6, IL7, IL10, IL12, IL 13, IL15, anti-CD40, CD40L, IFN-gamma and TNF-alpha. In another embodiment, Therapeutics of the invention may be administered with any interleukin, including, but not limited to, IL-1alpha, IL-1beta, IL-2, IL-3, IL-4, IL-5, IL-6, IL-7, IL-8, IL-9, IL-10, IL11, IL-12, IL-13, IL-14, IL-15, IL-16, IL-17, IL-18, IL-19, IL-20, and IL-21.

[1201] In one embodiment, the Therapeutics of the invention are administered in combination with members of the TNF family. TNF, TNF-related or TNF-like molecules that may be administered with the Therapeutics of the invention include, but are not limited to, soluble forms of TNF-alpha, lymphotoxin-alpha (LT-alpha, also known as TNF-beta), LT-beta (found in complex heterotrimer LT-alpha2-beta), OPGL, FasL, CD27L, CD30L, CD40L, 4-1BBL, DcR3, OX40L, TNF-gamma (International Publication No. WO 96/14328), AIM-I (International Publication No. WO 97/33899), endokine-alpha (International Publication No. WO 98/07880), OPG, and neutrokine-alpha (International Publication No. WO 98/18921, OX40, and nerve growth factor (NGF), and soluble forms of Fas, CD30, CD27, CD40 and 4-IBB, TR2 (International Publication No. WO 96/34095), DR3 (International Publication No. WO 97/33904), DR4 (International Publication No. WO 98/32856), TR5 (International Publication No. WO 98/30693), TRANK, TR9 (International Publication No. WO 98/56892),TR10 (International Publication No. WO 98/54202), 312C2 (International Publication No. WO 98/06842), and TR12, and soluble forms CD154, CD70, and CD153.

[1202] In an additional embodiment, the Therapeutics of the invention are administered in combination with angiogenic proteins. Angiogenic proteins that may be administered with the Therapeutics of the invention include, but are not limited to, Glioma Derived Growth Factor (GDGF), as disclosed in European Patent Number EP-399816; Platelet Derived Growth Factor-A (PDGF-A), as disclosed in European Patent Number EP-682110; Platelet Derived Growth Factor-B (PDGF-B), as disclosed in European Patent Number EP-282317; Placental Growth Factor (P1GF), as disclosed in International Publication Number WO 92/06194; Placental Growth Factor-2 (P1GF-2), as disclosed in Hauser et al., Growth Factors, 4:259-268 (1993); Vascular Endothelial Growth Factor (VEGF), as disclosed in International Publication Number WO 90/13649; Vascular Endothelial Growth Factor-A (VEGF-A), as disclosed in European Patent Number EP-506477; Vascular Endothelial Growth Factor-2 (VEGF-2), as disclosed in International Publication Number WO 96/39515; Vascular Endothelial Growth Factor B (VEGF-3); Vascular Endothelial Growth Factor B-186 (VEGF-B186), as disclosed in International Publication Number WO 96/26736; Vascular Endothelial Growth Factor-D (VEGF-D), as disclosed in International Publication Number WO 98/02543; Vascular Endothelial Growth Factor-D (VEGF-D), as disclosed in International Publication Number WO 98/07832; and Vascular Endothelial Growth Factor-E (VEGF-E), as disclosed in German Patent Number DE19639601. The above mentioned references are herein incorporated by reference in their entireties.

[1203] In an additional embodiment, the Therapeutics of the invention are administered in combination with Fibroblast Growth Factors. Fibroblast Growth Factors that may be administered with the Therapeutics of the invention include, but are not limited to, FGF-1, FGF-2, FGF-3, FGF-4, FGF-5, FGF-6, FGF-7, FGF-8, FGF-9, FGF-10, FGF-1 1, FGF-12, FGF-13, FGF-14, and FGF-15.

[1204] In an additional embodiment, the Therapeutics of the invention are administered in combination with hematopoietic growth factors. Hematopoietic growth factors that may be administered with the Therapeutics of the invention include, but are not limited to, granulocyte macrophage colony stimulating factor (GM-CSF) (sargramostim, LEUKINE™, PROKINE™), granulocyte colony stimulating factor (G-CSF) (filgrastim, NEUPOGEN™), macrophage colony stimulating factor (M-CSF, CSF-1) erythropoietin (epoetin alfa, EPOGEN™, PROCRIT™), stem cell factor (SCF, c-kit ligand, steel factor), megakaryocyte colony stimulating factor, PIXY321 (a GMCSF/IL-3 fusion protein), interleukins, especially any one or more of IL-1 through IL-12, interferon-gamma, or thrombopoietin.

[1205] In certain embodiments, Therapeutics of the present invention are administered in combination with adrenergic blockers, such as, for example, acebutolol, atenolol, betaxolol, bisoprolol, carteolol, labetalol, metoprolol, nadolol, oxprenolol, penbutolol, pindolol, propranolol, sotalol, and timolol.

[1206] In another embodiment, the Therapeutics of the invention are administered in combination with an antiarrhythmic drug (e.g., adenosine, amidoarone, bretylium, digitalis, digoxin, digitoxin, diliazem, disopyramide, esmolol, flecainide, lidocaine, mexiletine, moricizine, phenytoin, procainamide, N-acetyl procainamide, propafenone, propranolol, quinidine, sotalol, tocainide, and verapamil).

[1207] In another embodiment, the Therapeutics of the invention are administered in combination with diuretic agents, such as carbonic anhydrase-inhibiting agents (e.g., acetazolamide, dichlorphenamide, and methazolamide), osmotic diuretics (e.g., glycerin, isosorbide, mannitol, and urea), diuretics that inhibit Na⁺—K⁺-2Cl⁻ symport (e.g., furosemide, bumetanide, azosemide, piretanide, tripamide, ethacrynic acid, muzolimine, and torsemide), thiazide and thiazide-like diuretics (e.g., bendroflumethiazide, benzthiazide, chlorothiazide, hydrochlorothiazide, hydroflumethiazide, methyclothiazide, polythiazide, trichormethiazide, chlorthalidone, indapamide, metolazone, and quinethazone), potassium sparing diuretics (e.g., amiloride and triamterene), and mineralcorticoid receptor antagonists (e.g., spironolactone, canrenone, and potassium canrenoate).

[1208] In one embodiment, the Therapeutics of the invention are administered in combination with treatments for endocrine and/or hormone imbalance disorders. Treatments for endocrine and/or hormone imbalance disorders include, but are not limited to, ¹²⁷I, radioactive isotopes of iodine such as ¹³¹I and ¹²³I; recombinant growth hormone, such as HUMATROPE™ (recombinant somatropin); growth hormone analogs such as PROTROPIN™ (somatrem); dopamine agonists such as PARLODEL™(bromocriptine); somatostatin analogs such as SANDOSTATIN™ (octreotide); gonadotropin preparations such as PREGNYL™, A.P.L.™ and PROFASI™ (chorionic gonadotropin (CG)), PERGONAL™ (menotropins), and METRODIN™ (urofollitropin (uFSH)); synthetic human gonadotropin releasing hormone preparations such as FACTREL™ and LUTREPULSE™ (gonadorelin hydrochloride); synthetic gonadotropin agonists such as LUPRON™ (leuprolide acetate), SUPPRELIN™ (histrelin acetate), SYNAREL™ (nafarelin acetate), and ZOLADEX™ (goserelin acetate); synthetic preparations of thyrotropin-releasing hormone such as RELEFACT TRH™ and THYPINONE™ (protirelin); recombinant human TSH such as THYROGEN™; synthetic preparations of the sodium salts of the natural isomers of thyroid hormones such as L-T₄™, SYNTHROID™ and LEVOTHROID™ (levothyroxine sodium), L-T₃ ™, CYTOMEL™ and TRIOSTAT™ (liothyroine sodium), and THYROLAR™ (liotrix); antithyroid compounds such as 6-n-propylthiouracil (propylthiouracil), 1-methyl-2-mercaptoimidazole and TAPAZOLE™ (methimazole), NEO-MERCAZOLE™ (carbimazole); beta-adrenergic receptor antagonists such as propranolol and esmolol; Ca²⁺ channel blockers; dexamethasone and iodinated radiological contrast agents such as TELEPAQUE™ (iopanoic acid) and ORAGRAFIN™ (sodium ipodate).

[1209] Additional treatments for endocrine and/or hormone imbalance disorders include, but are not limited to, estrogens or congugated estrogens such as ESTRACE™ (estradiol), ESTINYL™ (ethinyl estradiol), PREMARIN™, ESTRATAB™, ORTHO-EST™, OGEN™ and estropipate (estrone), ESTROVIS™ (quinestrol), ESTRADERM™ (estradiol), DELESTROGEN™ and VALERGEN™ (estradiol valerate), DEPO-ESTRADIOL CYPIONATE™ and ESTROJECT LA™ (estradiol cypionate); antiestrogens such as NOLVADEX™ (tamoxifen), SEROPHENE™ and CLOMID™ (clomiphene); progestins such as DURALUTIN™ (hydroxyprogesterone caproate), MPA™ and DEPO-PROVERA™ (medroxyprogesterone acetate), PROVERA™ and CYCRIN™ (MPA), MEGACE™ (megestrol acetate), NORLUTIN™ (norethindrone), and NORLUTATE™ and AYGESTIN™ (norethindrone acetate); progesterone implants such as NORPLANT SYSTEM™ (subdermal implants of norgestrel); antiprogestins such as RU 486™ (mifepristone); hormonal contraceptives such as ENOVID™ (norethynodrel plus mestranol), PROGESTASERT™ (intrauterine device that releases progesterone), LOESTRIN™, BREVICON™, MODICON™, GENORA™, NELONA™, NORINYL™, OVACON-35™ and OVACON-50™ (ethinyl estradiol/norethindrone), LEVLEN™, NORDETTE™, TRI-LEVLEN™ and TRIPHASIL-21™ (ethinyl estradiol/levonorgestrel) LO/OVRAL™ and OVRAL™ (ethinyl estradiol/norgestrel), DEMULEN™ (ethinyl estradiol/ethynodiol diacetate), NORINYL™, ORTHO-NOVUM™, NORETHIN™, GENORA™, and NELOVA™ (norethindrone/mestranol), DESOGEN™ and ORTHO-CEPT™ (ethinyl estradiol/desogestrel), ORTHO-CYCLEN™ and ORTHO-TRICYCLEN™ (ethinyl estradiol/norgestimate), MICRONOR™ and NOR-QD™ (norethindrone), and OVRETTE™ (norgestrel).

[1210] Additional treatments for endocrine and/or hormone imbalance disorders include, but are not limited to, testosterone esters such as methenolone acetate and testosterone undecanoate; parenteral and oral androgens such as TESTOJECT-50™ (testosterone), TESTEX™ (testosterone propionate), DELATESTRYL™ (testosterone enanthate), DEPO-TESTOSTERONE™ (testosterone cypionate), DANOCRINE™ (danazol), HALOTESTIN™ (fluoxymesterone), ORETON METHYL™, TESTRED™ and VIRILON™ (methyltestosterone), and OXANDRIN™ (oxandrolone); testosterone transdermal systems such as TESTODERM™; androgen receptor antagonist and 5-alpha-reductase inhibitors such as ANDROCUR™ (cyproterone acetate), EULEXIN™ (flutarnide), and PROSCAR™ (finasteride); adrenocorticotropic hormone preparations such as CORTROSYN™ (cosyntropin); adrenocortical steroids and their synthetic analogs such as ACLOVATE™ (alclometasone dipropionate), CYCLOCORT™ (amcinonide), BECLOVEN™ and VANCERIL™ (beclomethasone dipropionate), CELESTONE™ (betamethasone), BENISONE™ and UTICORT™ (betamethasone benzoate), DIPROSONE™ (betamethasone dipropionate), CELESTONE PHOSPHATE™ (betamethasone sodium phosphate), CELESTONE SOLUSPAN™ (betamethasone sodium phosphate and acetate), BETA-VAL™ and VALISONE™ (betamethasone valerate), TEMOVATE™ (clobetasol propionate), CLODERM™ (clocortolone pivalate), CORTEF™ and HYDROCORTONE™ (cortisol(hydrocortisone)), HYDROCORTONE ACETATE™ (cortisol(hydrocortisone) acetate), LOCOID™ (cortisol(hydrocortisone)butyrate), HYDROCORTONE PHOSPHATE™ (cortisol(hydrocortisone)sodium phosphate), A-HYDROCORT™ and SOLU CORTEF™ (cortisol(hydrocortisone)sodium succinate), WESTCORT™ (cortisol(hydrocortisone)valerate), CORTISONE ACETATE™ (cortisone acetate), DESOWEN™ and TRIDESILON™ (desonide), TOPICORT™ (desoximetasone), DECADRON™ (dexamethasone), DECADRON LA™ (dexamethasone acetate), DECADRON PHOSPHATE™ and HEXADROL PHOSPHATE™ (dexamethasone sodium phosphate), FLORONE™ and MAXIFLOR™ (diflorasone diacetate), FLORINEF ACETATE™ (fludrocortisone acetate), AEROBID™ and NASALIDE™ (flunisolide), FLUONID™ and SYNALAR™ (fluocinolone acetonide), LIDEX™ (fluocinonide), FLUOR-OP™ and FML™ (fluorometholone), CORDRAN™ (flurandrenolide), HALOG™ (halcinonide), HMS LIZUIFILM™ (medrysone), MEDROL™ (methylprednisolone), DEPO-MEDROL™ and MEDROL ACETATE™ (methylprednisone acetate), A-METHAPRED™ and SOLUMEDROL™ (methylprednisolone sodium succinate), ELOCON™ (mometasone furoate), HALDRONE™ (paramethasone acetate), DELTA-CORTE™ (prednisolone), ECONOPRED™ (prednisolone acetate), HYDELTRASOL™ (prednisolone sodium phosphate), HYDELTRA-T.B.A™ (prednisolone tebutate), DELTASONE™ (prednisone), ARISTOCORT™ and KENACORT™ (triamcinolone), KENALOG™ (triamcinolone acetonide), ARISTOCORT™ and KENACORT DIACETATE™ (triamcinolone diacetate), and ARISTOSPAN™ (triamcinolone hexacetonide); inhibitors of biosynthesis and action of adrenocortical steroids such as CYTADREN™ (aminoglutethimide), NIZORAL™ (ketoconazole), MODRASTANE™ (trilostane), and METOPIRONE™ (metyrapone); bovine, porcine or human insulin or mixtures thereof; insulin analogs; recombinant human insulin such as HUMULIN™ and NOVOLIN™; oral hypoglycemic agents such as ORAMIDE™ and ORINASE™ (tolbutamide), DIABINESE™ (chlorpropamide), TOLAMIDE™ and TOLINASE™ (tolazamide), DYMELOR™ (acetohexarnide), glibenclamide, MICRONASE™, DEBETA™ and GLYNASE™ (glyburide), GLUCOTROL™ (glipizide), and DIAMICRON™ (gliclazide), GLUCOPHAGE™ (metformin), ciglitazone, pioglitazone, and alpha-glucosidase inhibitors; bovine or porcine glucagon; somatostatins such as SANDOSTATIN™ (octreotide); and diazoxides such as PROGLYCEM™ (diazoxide).

[1211] In one embodiment, the Therapeutics of the invention are administered in combination with treatments for uterine motility disorders. Treatments for uterine motility disorders include, but are not limited to, estrogen drugs such as conjugated estrogens (e.g., PREMARIN® and ESTRATAB®), estradiols (e.g., CLIMARA® and ALORA®), estropipate, and chlorotrianisene; progestin drugs (e.g., AMEN® (medroxyprogesterone), MICRONOR® (norethidrone acetate), PROMETRIUM® progesterone, and megestrol acetate); and estrogen/progesterone combination therapies such as, for example, conjugated estrogens/medroxyprogesterone (e.g., PREMPRO™ and PREMPHASE®) and norethindrone acetate/ethinyl estsradiol (e.g., FEMHRT™).

[1212] In an additional embodiment, the Therapeutics of the invention are administered in combination with drugs effective in treating iron deficiency and hypochromic anemias, including but not limited to, ferrous sulfate (iron sulfate, FEOSOL™), ferrous fumarate (e.g., FEOSTAT™), ferrous gluconate (e.g., FERGON™), polysaccharide-iron complex (e.g., NEFEREX™), iron dextran injection (e.g., INFED™), cupric sulfate, pyroxidine, riboflavin, Vitamin B₁₂, cyancobalamin injection (e.g., REDISOL™, RUBRAMIN PC™), hydroxocobalamin, folic acid (e.g., FOLVITE™), leucovorin (folinic acid, 5-CHOH4PteGlu, citrovorum factor) or WELLCOVORIN (Calcium salt of leucovorin), transferrin or ferritin.

[1213] In certain embodiments, the Therapeutics of the invention are administered in combination with agents used to treat psychiatric disorders. Psychiatric drugs that may be administered with the Therapeutics of the invention include, but are not limited to, antipsychotic agents (e.g., chlorpromazine, chlorprothixene, clozapine, fluphenazine, haloperidol, loxapine, mesoridazine, molindone, olanzapine, perphenazine, pimozide, quetiapine, risperidone, thioridazine, thiothixene, trifluoperazine, and triflupromazine), antimanic agents (e.g., carbamazepine, divalproex sodium, lithium carbonate, and lithium citrate), antidepressants (e.g., amitriptyline, arnoxapine, bupropion, citalopram, clomipramine, desipramine, doxepin, fluvoxamine, fluoxetine, imipramine, isocarboxazid, maprotiline, mirtazapine, nefazodone, nortriptyline, paroxetine, phenelzine, protriptyline, sertraline, tranylcypromine, trazodone, trimipramine, and venlafaxine), antianxiety agents (e.g., alprazolam, buspirone, chlordiazepoxide, clorazepate, diazepam, halazepam, lorazepam, oxazepam, and prazepam), and stimulants (e.g., d-amphetamine, methylphenidate, and pemoline).

[1214] In other embodiments, the Therapeutics of the invention are administered in combination with agents used to treat neurological disorders. Neurological agents that may be administered with the Therapeutics of the invention include, but are not limited to, antiepileptic agents (e.g., carbamazepine, clonazepam, ethosuximide, phenobarbital, phenytoin, primidone, valproic acid, divalproex sodium, felbamate, gabapentin, lamotrigine, levetiracetam, oxcarbazepine, tiagabine, topiramate, zonisamide, diazepam, lorazepam, and clonazepam), antiparkinsonian agents (e.g., levodopa/carbidopa, selegiline, amantidine, bromocriptine, pergolide, ropinirole, pramipexole, benztropine; biperiden; ethopropazine; procyclidine; trihexyphenidyl, tolcapone), and ALS therapeutics (e.g. riluzole).

[1215] In another embodiment, Therapeutics of the invention are administered in combination with vasodilating agents and/or calcium channel blocking agents. Vasodilating agents that may be administered with the Therapeutics of the invention include, but are not limited to, Angiotensin Converting Enzyme (ACE) inhibitors (e.g., papaverine, isoxsuprine, benazepril, captopril, cilazapril, enalapril, enalaprilat, fosinopril, lisinopril, moexipril, perindopril, quinapril, ramipril, spirapril, trandolapril, and nylidrin), and nitrates (e.g., isosorbide dinitrate, isosorbide mononitrate, and nitroglycerin). Examples of calcium channel blocking agents that may be administered in combination with the Therapeutics of the invention include, but are not limited to amilodipine, bepridil, diltiazem, felodipine, flunarizine, isradipine, nicardipine, nifedipine, nimodipine, and verapamil.

[1216] In certain embodiments, the Therapeutics of the invention are administered in combination with treatments for gastrointestinal disorders. Treatments for gastrointestinal disorders that may be administered with the Therapeutic of the invention include, but are not limited to, H₂ histamine receptor antagonists (e.g., TAGAMET™ (cimetidine), ZANTAC™ (ranitidine), PEPCID™ (famotidine), and AXID™ (nizatidine)); inhibitors of H⁺, K⁺ ATPase (e.g., PREVACID™ (lansoprazole) and PRILOSEC™ (omeprazole)); Bismuth compounds (e.g., PEPTO-BISMOL™ (bismuth subsalicylate) and DE-NOL™ (bismuth subcitrate)); various antacids; sucralfate; prostaglandin analogs (e.g. CYTOTEC™ (misoprostol)); muscarinic cholinergic antagonists; laxatives (e.g., surfactant laxatives, stimulant laxatives, saline and osmotic laxatives); antidiarrheal agents (e.g., LOMOTIL™ (diphenoxylate), MOTOFEN™ (diphenoxin), and IMODIUM™ (loperamide hydrochloride)), synthetic analogs of somatostatin such as SANDOSTATIN™ (octreotide), antiemetic agents (e.g., ZOFRAN™ (ondansetron), KYTRIL™ (granisetron hydrochloride), tropisetron, dolasetron, metoclopramide, chlorpromazine, perphenazine, prochiorperazine, promethazine, thiethylperazine, triflupromazine, domperidone, haloperidol, droperidol, trimethobenzamide, dexamethasone, methylprednisolone, dronabinol, and nabilone); D2 antagonists (e.g., metoclopramide, trimethobenzamnide and chlorpromazine); bile salts; chenodeoxycholic acid; ursodeoxycholic acid; and pancreatic enzyme preparations such as pancreatin and pancrelipase.

[1217] In additional embodiments, the Therapeutics of the invention are administered in combination with other therapeutic or prophylactic regimens, such as, for example, radiation therapy.

### Example 14

### Method of Treating Decreased Levels of the Polypeptide

[1218] The present invention relates to a method for treating an individual in need of an increased level of a polypeptide of the invention in the body comprising administering to such an individual a composition comprising a therapeutically effective amount of an agonist of the invention (including polypeptides of the invention). Moreover, it will be appreciated that conditions caused by a decrease in the standard or normal expression level of a polypeptide of the present invention in an individual can be treated by administering the agonist or antagonist of the present invention. Thus, the invention also provides a method of treatment of an individual in need of an increased level of the polypeptide comprising administering to such an individual a Therapeutic comprising an amount of the agonist or antagonist to increase the activity level of the polypeptide in such an individual.

[1219] For example, a patient with decreased levels of a polypeptide receives a daily dose 0.1-100 ug/kg of the agonist or antagonist for six consecutive days. The exact details of the dosing scheme, based on administration and formulation, are provided in Example 13.

### Example 15

### Method of Treating Increased Levels of the Polypeptide

[1220] The present invention also relates to a method of treating an individual in need of a decreased level of a polypeptide of the invention in the body comprising administering to such an individual a composition comprising a therapeutically effective amount of an antagonist of the invention (including polypeptides and antibodies of the invention).

[1221] In one example, antisense technology is used to inhibit production of a polypeptide of the present invention. This technology is one example of a method of decreasing levels of a polypeptide, due to a variety of etiologies, such as cancer.

[1222] For example, a patient diagnosed with abnormally increased levels of a polypeptide is administered intravenously antisense polynucleotides at 0.5, 1.0, 1.5, 2.0 and 3.0 mg/kg day for 21 days. This treatment is repeated after a 7-day rest period if the treatment was well tolerated. The antisense polynucleotides of the present invention can be formulated using techniques and formulations described herein (e.g. see Example 13), or otherwise known in the art.

### Example 16

### Method of Treatment Using Gene Therapy-Ex Vivo

[1223] One method of gene therapy transplants fibroblasts, which are capable of expressing a polypeptide, onto a patient. Generally, fibroblasts are obtained from a subject by skin biopsy. The resulting tissue is placed in tissue-culture medium and separated into small pieces. Small chunks of the tissue are placed on a wet surface of a tissue culture flask, approximately ten pieces are placed in each flask. The flask is turned upside down, closed tight and left at room temperature over night. After 24 hours at room temperature, the flask is inverted and the chunks of tissue remain fixed to the bottom of the flask and fresh media (e.g., Ham's F12 media, with 10% FBS, penicillin and streptomycin) is added. The flasks are then incubated at 37 degree C. for approximately one week.

[1224] At this time, fresh media is added and subsequently changed every several days. After an additional two weeks in culture, a monolayer of fibroblasts emerge. The monolayer is trypsinized and scaled into larger flasks.

[1225] pMV-7 (Kirschmeier, P. T. et al., DNA, 7:219-25 (1988)), flanked by the long terminal repeats of the Moloney murine sarcoma virus, is digested with EcoRI and HindIII and subsequently treated with calf intestinal phosphatase. The linear vector is fractionated on agarose gel and purified, using glass beads.

[1226] The cDNA encoding a polypeptide of the present invention can be amplified using PCR primers which correspond to the 5′ and 3′ end sequences respectively as set forth in Example 1 using primers and having appropriate restriction sites and initiation/stop codons, if necessary. Preferably, the 5′ primer contains an EcoRI site and the 3′ primer includes a HindIII site. Equal quantities of the Moloney murine sarcoma virus linear backbone and the amplified EcoRI and HindIII fragment are added together, in the presence of T4 DNA ligase. The resulting mixture is maintained under conditions appropriate for ligation of the two fragments. The ligation mixture is then used to transform bacteria HB101, which are then plated onto agar containing kanamycin for the purpose of confirming that the vector has the gene of interest properly inserted.

[1227] The amphotropic pA317 or GP+am12 packaging cells are grown in tissue culture to confluent density in Dulbecco's Modified Eagles Medium (DMEM) with 10% calf serum (CS), penicillin and streptomycin. The MSV vector containing the gene is then added to the media and the packaging cells transduced with the vector. The packaging cells now produce infectious viral particles containing the gene (the packaging cells are now referred to as producer cells).

[1228] Fresh media is added to the transduced producer cells, and subsequently, the media is harvested from a 10 cm plate of confluent producer cells. The spent media, containing the infectious viral particles, is filtered through a millipore filter to remove detached producer cells and this media is then used to infect fibroblast cells. Media is removed from a sub-confluent plate of fibroblasts and quickly replaced with the media from the producer cells. This media is removed and replaced with fresh media. If the titer of virus is high, then virtually all fibroblasts will be infected and no selection is required. If the titer is very low, then it is necessary to use a retroviral vector that has a selectable marker, such as neo or his. Once the fibroblasts have been efficiently infected, the fibroblasts are analyzed to determine whether protein is produced.

[1229] The engineered fibroblasts are then transplanted onto the host, either alone or after having been grown to confluence on cytodex 3 microcarrier beads.

### Example 17

### Gene Therapy Using Endogenous Genes Corresponding to Polynucleotides of the Invention

[1230] Another method of gene therapy according to the present invention involves operably associating the endogenous polynucleotide sequence of the invention with a promoter via homologous recombination as described, for example, in U.S. Pat. No. 5,641,670, issued Jun. 24, 1997; International Publication NO: WO 96/29411, published Sep. 26, 1996; International Publication NO: WO 94/12650, published Aug. 4, 1994; Koller et al., Proc. Natl. Acad. Sci. USA, 86:8932-8935 (1989); and Zijlstra et al., Nature, 342:435-438 (1989). This method involves the activation of a gene which is present in the target cells, but which is not expressed in the cells, or is expressed at a lower level than desired.

[1231] Polynucleotide constructs are made which contain a promoter and targeting sequences, which are homologous to the 5′ non-coding sequence of endogenous polynucleotide sequence, flanking the promoter. The targeting sequence will be sufficiently near the 5′ end of the polynucleotide sequence so the promoter will be operably linked to the endogenous sequence upon homologous recombination. The promoter and the targeting sequences can be amplified using PCR. Preferably, the amplified promoter contains distinct restriction enzyme sites on the 5′ and 3′ ends. Preferably, the 3′ end of the first targeting sequence contains the same restriction enzyme site as the 5′ end of the amplified promoter and the 5′ end of the second targeting sequence contains the same restriction site as the 3′ end of the amplified promoter.

[1232] The amplified promoter and the amplified targeting sequences are digested with the appropriate restriction enzymes and subsequently treated with calf intestinal phosphatase. The digested promoter and digested targeting sequences are added together in the presence of T4 DNA ligase. The resulting mixture is maintained under conditions appropriate for ligation of the two fragments. The construct is size fractionated on an agarose gel, then purified by phenol extraction and ethanol precipitation.

[1233] In this Example, the polynucleotide constructs are administered as naked polynucleotides via electroporation. However, the polynucleotide constructs may also be administered with transfection-facilitating agents, such as liposomes, viral sequences, viral particles, precipitating agents, etc. Such methods of delivery are known in the art.

[1234] Once the cells are transfected, homologous recombination will take place which results in the promoter being operably linked to the endogenous polynucleotide sequence. This results in the expression of polynucleotide corresponding to the polynucleotide in the cell. Expression may be detected by immunological staining, or any other method known in the art.

[1235] Fibroblasts are obtained from a subject by skin biopsy. The resulting tissue is placed in DMEM+10% fetal calf serum. Exponentially growing or early stationary phase fibroblasts are trypsinized and rinsed from the plastic surface with nutrient medium. An aliquot of the cell suspension is removed for counting, and the remaining cells are subjected to centrifugation. The supernatant is aspirated and the pellet is resuspended in 5 ml of electroporation buffer (20 mM HEPES pH 7.3, 137 mM NaCl, 5 mM KCl, 0.7 mM Na₂ HPO₄, 6 mM dextrose). The cells are recentrifuged, the supernatant aspirated, and the cells resuspended in electroporation buffer containing 1 mg/ml acetylated bovine serum albumin. The final cell suspension contains approximately 3×10⁶ cells/ml. Electroporation should be performed immediately following resuspension.

[1236] Plasmid DNA is prepared according to standard techniques. For example, to construct a plasmid for targeting to the locus corresponding to the polynucleotide of the invention, plasmid pUC18 (MBI Fermentas, Amherst, N.Y.) is digested with HindIII. The CMV promoter is amplified by PCR with an XbaI site on the 5′ end and a BamHI site on the 3′ end. Two non-coding sequences are amplified via PCR: one non-coding sequence (fragment 1) is amplified with a Hindif site at the 5′ end and an Xba site at the 3′end; the other non-coding sequence (fragment 2) is amplified with a BamHI site at the 5′end and a HindIII site at the 3′end. The CMV promoter and the fragments (1 and 2) are digested with the appropriate enzymes (CMV promoter—XbaI and BamHI; fragment 1 —XbaI; fragment 2—BamHI) and ligated together. The resulting ligation product is digested with HindIII, and ligated with the HindIII-digested pUC18 plasmid.

[1237] Plasmid DNA is added to a sterile cuvette with a 0.4 cm electrode gap (Bio-Rad). The final DNA concentration is generally at least 120 μg/ml. 0.5 ml of the cell suspension (containing approximately 1.5.×10⁶ cells) is then added to the cuvette, and the cell suspension and DNA solutions are gently mixed. Electroporation is performed with a Gene-Pulser apparatus (Bio-Rad). Capacitance and voltage are set at 960 μF and 250-300 V, respectively. As voltage increases, cell survival decreases, but the percentage of surviving cells that stably incorporate the introduced DNA into their genome increases dramatically. Given these parameters, a pulse time of approximately 14-20 mSec should be observed.

[1238] Electroporated cells are maintained at room temperature for approximately 5 min, and the contents of the cuvette are then gently removed with a sterile transfer pipette. The cells are added directly to 10 ml of prewarmed nutrient media (DMEM with 15% calf serum) in a 10 cm dish and incubated at 37 degree C. The following day, the media is aspirated and replaced with 10 ml of fresh media and incubated for a further 16-24 hours.

[1239] The engineered fibroblasts are then injected into the host, either alone or after having been grown to confluence on cytodex 3 microcarrier beads. The fibroblasts now produce the protein product. The fibroblasts can then be introduced into a patient as described above.

### Example 18

### Method of Treatment Using Gene Therapy—In Vivo

[1240] Another aspect of the present invention is using in vivo gene therapy methods to treat disorders, diseases and conditions. The gene therapy method relates to the introduction of naked nucleic acid (DNA, RNA, and antisense DNA or RNA) sequences into an animal to increase or decrease the expression of the polypeptide. The polynucleotide of the present invention may be operatively linked to (i.e., associated with) a promoter or any other genetic elements necessary for the expression of the polypeptide by the target tissue. Such gene therapy and delivery techniques and methods are known in the art, see, for example, WO90/11092, WO98/11779; U.S. Pat. Nos. 5,693,622, 5,705,151, 5,580,859; Tabata et al., Cardiovasc. Res. 35(3):470-479 (1997); Chao et al., Pharmacol. Res. 35(6):517-522 (1997); Wolff, Neuromuscul. Disord. 7(5):314-318 (1997); Schwartz et al., Gene Ther. 3(5):405-411 (1996); Tsurumi et al., Circulation 94(12):3281-3290 (1996) (incorporated herein by reference).

[1241] The polynucleotide constructs may be delivered by any method that delivers injectable materials to the cells of an animal, such as, injection into the interstitial space of tissues (heart, muscle, skin, lung, liver, intestine and the like). The polynucleotide constructs can be delivered in a pharmaceutically acceptable liquid or aqueous carrier.

[1242] The term “naked” polynucleotide, DNA or RNA, refers to sequences that are free from any delivery vehicle that acts to assist, promote, or facilitate entry into the cell, including viral sequences, viral particles, liposome formulations, lipofectin or precipitating agents and the like. However, the polynucleotides of the present invention may also be delivered in liposome formulations (such as those taught in Felgner P. L. et al. (1995) Ann. NY Acad. Sci. 772:126-139 and Abdallah B. et al. (1995) Biol. Cell 85(1):1-7) which can be prepared by methods well known to those skilled in the art.

[1243] The polynucleotide vector constructs used in the gene therapy method are preferably constructs that will not integrate into the host genome nor will they contain sequences that allow for replication. Any strong promoter known to those skilled in the art can be used for driving the expression of DNA. Unlike other gene therapy techniques, one major advantage of introducing naked nucleic acid sequences into target cells is the transitory nature of the polynucleotide synthesis in the cells. Studies have shown that non-replicating DNA sequences can be introduced into cells to provide production of the desired polypeptide for periods of up to six months.

[1244] The polynucleotide construct can be delivered to the interstitial space of tissues within an animal, including muscle, skin, brain, lung, liver, spleen, bone marrow, thymus, heart, lymph, blood, bone, cartilage, pancreas, kidney, gall bladder, stomach, intestine, testis, ovary, uterus, rectum, nervous system, eye, gland, and connective tissue. Interstitial space of the tissues comprises the intercellular fluid, mucopolysaccharide matrix among the reticular fibers of organ tissues, elastic fibers in the walls of vessels or chambers, collagen fibers of fibrous tissues, or that same matrix within connective tissue ensheathing muscle cells or in the lacunae of bone. It is similarly the space occupied by the plasma of the circulation and the lymph fluid of the lymphatic channels. Delivery to the interstitial space of muscle tissue is preferred for the reasons discussed below. They may be conveniently delivered by injection into the tissues comprising these cells. They are preferably delivered to and expressed in persistent, non-dividing cells which are differentiated, although delivery and expression may be achieved in non-differentiated or less completely differentiated cells, such as, for example, stem cells of blood or skin fibroblasts. In vivo muscle cells are particularly competent in their ability to take up and express polynucleotides.

[1245] For the naked polynucleotide injection, an effective dosage amount of DNA or RNA will be in the range of from about 0.05 g/kg body weight to about 50 mg/kg body weight. Preferably the dosage will be from about 0.005 mg/kg to about 20 mg/kg and more preferably from about 0.05 mg/kg to about 5 mg/kg. Of course, as the artisan of ordinary skill will appreciate, this dosage will vary according to the tissue site of injection. The appropriate and effective dosage of nucleic acid sequence can readily be determined by those of ordinary skill in the art and may depend on the condition being treated and the route of administration. The preferred route of administration is by the parenteral route of injection into the interstitial space of tissues. However, other parenteral routes may also be used, such as, inhalation of an aerosol formulation particularly for delivery to lungs or bronchial tissues, throat or mucous membranes of the nose. In addition, naked polynucleotide constructs can be delivered to arteries during angioplasty by the catheter used in the procedure.

[1246] The dose response effects of injected polynucleotide in muscle in vivo is determined as follows. Suitable template DNA for production of mRNA coding for polypeptide of the present invention is prepared in accordance with a standard recombinant DNA methodology. The template DNA, which may be either circular or linear, is either used as naked DNA or complexed with liposomes. The quadriceps muscles of mice are then injected with various amounts of the template DNA.

[1247] Five to six week old female and male Balb/C mice are anesthetized by intraperitoneal injection with 0.3 ml of 2.5% Avertin. A 1.5 cm incision is made on the anterior thigh, and the quadriceps muscle is directly visualized. The template DNA is injected in 0.1 ml of carrier in a 1 cc syringe through a 27 gauge needle over one minute, approximately 0.5 cm from the distal insertion site of the muscle into the knee and about 0.2 cm deep. A suture is placed over the injection site for future localization, and the skin is closed with stainless steel clips.

[1248] After an appropriate incubation time (e.g., 7 days) muscle extracts are prepared by excising the entire quadriceps. Every fifth 15 um cross-section of the individual quadriceps muscles is histochemically stained for protein expression. A time course for protein expression may be done in a similar fashion except that quadriceps from different mice are harvested at different times. Persistence of DNA in muscle following injection may be determined by Southern blot analysis after preparing total cellular DNA and HIRT supernatants from injected and control mice. The results of the above experimentation in mice can be used to extrapolate proper dosages and other treatment parameters in humans and other animals using naked DNA.

### Example 19

### Transgenic Animals

[1249] The polypeptides of the invention can also be expressed in transgenic animals. Animals of any species, including, but not limited to, mice, rats, rabbits, hamsters, guinea pigs, pigs, micro-pigs, goats, sheep, cows and non-human primates, e.g., baboons, monkeys, and chimpanzees may be used to generate transgenic animals. In a specific embodiment, techniques described herein or otherwise known in the art, are used to express polypeptides of the invention in humans, as part of a gene therapy protocol.

[1250] Any technique known in the art may be used to introduce the transgene (i.e., polynucleotides of the invention) into animals to produce the founder lines of transgenic animals. Such techniques include, but are not limited to, pronuclear microinjection (Paterson et al., Appl. Microbiol. Biotechnol. 40:691-698 (1994); Carver et al., Biotechnology (NY) 11:1263-1270 (1993); Wright et al., Biotechnology (NY) 9:830-834 (1991); and Hoppe et al., U.S. Pat. No. 4,873,191 (1989)); retrovirus mediated gene transfer into germ lines (Van der Putten et al., Proc. Natl. Acad. Sci., USA 82:6148-6152 (1985)), blastocysts or embryos; gene targeting in embryonic stem cells (Thompson et al., Cell 56:313-321 (1989)); electroporation of cells or embryos (Lo, 1983, Mol Cell. Biol. 3:1803-1814 (1983)); introduction of the polynucleotides of the invention using a gene gun (see, e.g., Ulmer et al., Science 259:1745 (1993); introducing nucleic acid constructs into embryonic pleuripotent stem cells and transferring the stem cells back into the blastocyst; and sperm-mediated gene transfer (Lavitrano et al., Cell 57:717-723 (1989); etc. For a review of such techniques, see Gordon, “Transgenic Animals,” Intl. Rev. Cytol. 115:171-229 (1989), which is incorporated by reference herein in its entirety.

[1251] Any technique known in the art may be used to produce transgenic clones containing polynucleotides of the invention, for example, nuclear transfer into enucleated oocytes of nuclei from cultured embryonic, fetal, or adult cells induced to quiescence (Campell et al., Nature 380:64-66 (1996); Wilmut et al., Nature 385:810-813 (1997)).

[1252] The present invention provides for transgenic animals that carry the transgene in all their cells, as well as animals which carry the transgene in some, but not all their cells, i.e., mosaic animals or chimeric. The transgene may be integrated as a single transgene or as multiple copies such as in concatamers, e.g., head-to-head tandems or head-to-tail tandems. The transgene may also be selectively introduced into and activated in a particular cell type by following, for example, the teaching of Lasko et al. (Lasko et al., Proc. Natl. Acad. Sci. USA 89:6232-6236 (1992)). The regulatory sequences required for such a cell-type specific activation will depend upon the particular cell type of interest, and will be apparent to those of skill in the art. When it is desired that the polynucleotide transgene be integrated into the chromosomal site of the endogenous gene, gene targeting is preferred. Briefly, when such a technique is to be utilized, vectors containing some nucleotide sequences homologous to the endogenous gene are designed for the purpose of integrating, via homologous recombination with chromosomal sequences, into and disrupting the function of the nucleotide sequence of the endogenous gene. The transgene may also be selectively introduced into a particular cell type, thus inactivating the endogenous gene in only that cell type, by following, for example, the teaching of Gu et al. (Gu et al., Science 265:103-106 (1994)). The regulatory sequences required for such a cell-type specific inactivation will depend upon the particular cell type of interest, and will be apparent to those of skill in the art.

[1253] Once transgenic animals have been generated, the expression of the recombinant gene may be assayed utilizing standard techniques. Initial screening may be accomplished by Southern blot analysis or PCR techniques to analyze animal tissues to verify that integration of the transgene has taken place. The level of mRNA expression of the transgene in the tissues of the transgenic animals may also be assessed using techniques which include, but are not limited to, Northern blot analysis of tissue samples obtained from the animal, in situ hybridization analysis, and reverse transcriptase-PCR (rt-PCR). Samples of transgenic gene-expressing tissue may also be evaluated immunocytochemically or immunohistochemically using antibodies specific for the transgene product.

[1254] Once the founder animals are produced, they may be bred, inbred, outbred, or crossbred to produce colonies of the particular animal. Examples of such breeding strategies include, but are not limited to: outbreeding of founder animals with more than one integration site in order to establish separate lines; inbreeding of separate lines in order to produce compound transgenics that express the transgene at higher levels because of the effects of additive expression of each transgene; crossing of heterozygous transgenic animals to produce animals homozygous for a given integration site in order to both augment expression and eliminate the need for screening of animals by DNA analysis; crossing of separate homozygous lines to produce compound heterozygous or homozygous lines; and breeding to place the transgene on a distinct background that is appropriate for an experimental model of interest.

[1255] Transgenic animals of the invention have uses which include, but are not limited to, animal model systems useful in elaborating the biological function of polypeptides of the present invention, studying conditions and/or disorders associated with aberrant expression, and in screening for compounds effective in ameliorating such conditions and/or disorders.

### Example 20

### Knock-Out Animals

[1256] Endogenous gene expression can also be reduced by inactivating or “knocking out” the gene and/or its promoter using targeted homologous recombination. (e.g., see Smithies et al., Nature 317:230-234 (1985); Thomas & Capecchi, Cell 51:503-512 (1987); Thompson et al., Cell 5:313-321 (1989); each of which is incorporated by reference herein in its entirety). For example, a mutant, non-functional polynucleotide of the invention (or a completely unrelated DNA sequence) flanked by DNA homologous to the endogenous polynucleotide sequence (either the coding regions or regulatory regions of the gene) can be used, with or without a selectable marker and/or a negative selectable marker, to transfect cells that express polypeptides of the invention in vivo. In another embodiment, techniques known in the art are used to generate knockouts in cells that contain, but do not express the gene of interest. Insertion of the DNA construct, via targeted homologous recombination, results in inactivation of the targeted gene. Such approaches are particularly suited in research and agricultural fields where modifications to embryonic stem cells can be used to generate animal offspring with an inactive targeted gene (e.g., see Thomas & Capecchi 1987 and Thompson 1989, supra). However this approach can be routinely adapted for use in humans provided the recombinant DNA constructs are directly administered or targeted to the required site in vivo using appropriate viral vectors that will be apparent to those of skill in the art.

[1257] In further embodiments of the invention, cells that are genetically engineered to express the polypeptides of the invention, or alternatively, that are genetically engineered not to express the polypeptides of the invention (e.g., knockouts) are administered to a patient in vivo. Such cells may be obtained from the patient (i.e., animal, including human) or an MHC compatible donor and can include, but are not limited to fibroblasts, bone marrow cells, blood cells (e.g., lymphocytes), adipocytes, muscle cells, endothelial cells etc. The cells are genetically engineered in vitro using recombinant DNA techniques to introduce the coding sequence of polypeptides of the invention into the cells, or alternatively, to disrupt the coding sequence and/or endogenous regulatory sequence associated with the polypeptides of the invention, e.g., by transduction (using viral vectors, and preferably vectors that integrate the transgene into the cell genome) or transfection procedures, including, but not limited to, the use of plasmids, cosmids, YACs, naked DNA, electroporation, liposomes, etc. The coding sequence of the polypeptides of the invention can be placed under the control of a strong constitutive or inducible promoter or promoter/enhancer to achieve expression, and preferably secretion, of the polypeptides of the invention. The engineered cells which express and preferably secrete the polypeptides of the invention can be introduced into the patient systemically, e.g., in the circulation, or intraperitoneally.

[1258] Alternatively, the cells can be incorporated into a matrix and implanted in the body, e.g., genetically engineered fibroblasts can be implanted as part of a skin graft; genetically engineered endothelial cells can be implanted as part of a lymphatic or vascular graft. (See, for example, Anderson et al. U.S. Pat. No. 5,399,349; and Mulligan & Wilson, U.S. Pat. No. 5,460,959 each of which is incorporated by reference herein in its entirety).

[1259] When the cells to be administered are non-autologous or non-MHC compatible cells, they can be administered using well known techniques which prevent the development of a host immune response against the introduced cells. For example, the cells may be introduced in an encapsulated form which, while allowing for an exchange of components with the immediate extracellular environment, does not allow the introduced cells to be recognized by the host immune system.

[1260] Transgenic and “knock-out” animals of the invention have uses which include, but are not limited to, animal model systems useful in elaborating the biological function of polypeptides of the present invention, studying conditions and/or disorders associated with aberrant expression, and in screening for compounds effective in ameliorating such conditions and/or disorders.

### Example 21

### Assays Detecting Stimulation or Inhibition of B Cell Proliferation and Differentiation

[1261] Generation of functional humoral immune responses requires both soluble and cognate signaling between B-lineage cells and their microenvironment. Signals may impart a positive stimulus that allows a B-lineage cell to continue its programmed development, or a negative stimulus that instructs the cell to arrest its current developmental pathway. To date, numerous stimulatory and inhibitory signals have been found to influence B cell responsiveness including IL-2, IL-4, IL-5, IL-6, IL-7, EL10, IL-13, IL-14 and IL-15. Interestingly, these signals are by themselves weak effectors but can, in combination with various co-stimulatory proteins, induce activation, proliferation, differentiation, homing, tolerance and death among B cell populations.

[1262] One of the best studied classes of B-cell co-stimulatory proteins is the TNF-superfamily. Within this family CD40, CD27, and CD30 along with their respective ligands CD154, CD70, and CD153 have been found to regulate a variety of immune responses. Assays which allow for the detection and/or observation of the proliferation and differentiation of these B-cell populations and their precursors are valuable tools in determining the effects various proteins may have on these B-cell populations in terms of proliferation and differentiation. Listed below are two assays designed to allow for the detection of the differentiation, proliferation, or inhibition of B-cell populations and their precursors.

[1263] In Vitro Assay—Agonists or antagonists of the invention can be assessed for its ability to induce activation, proliferation, differentiation or inhibition and/or death in B-cell populations and their precursors. The activity of the agonists or antagonists of the invention on purified human tonsillar B cells, measured qualitatively over the dose range from 0.1 to 10,000 ng/mL, is assessed in a standard B-lymphocyte co-stimulation assay in which purified tonsillar B cells are cultured in the presence of either formalin-fixed Staphylococcus aureus Cowan I (SAC) or immobilized anti-human IgM antibody as the priming agent. Second signals such as IL-2 and IL-15 synergize with SAC and IgM crosslinking to elicit B cell proliferation as measured by tritiated-thymidine incorporation. Novel synergizing agents can be readily identified using this assay. The assay involves isolating human tonsillar B cells by magnetic bead (MACS) depletion of CD3-positive cells. The resulting cell population is greater than 95% B cells as assessed by expression of CD45R(B220).

[1264] Various dilutions of each sample are placed into individual wells of a 96-well plate to which are added 10⁵ B-cells suspended in culture medium (RPMI 1640 containing 10% FBS, 5×10⁻⁵M 2ME, 100 U/ml penicillin, 10 ug/ml streptomycin, and 10⁻⁵ dilution of SAC) in a total volume of 150 ul. Proliferation or inhibition is quantitated by a 20 h pulse (1 uCi/well) with 3H-thymidine (6.7 Ci/mM) beginning 72 h post factor addition. The positive and negative controls are IL2 and medium respectively.

[1265] In vivo Assay—BALB/c mice are injected (i.p.) twice per day with buffer only, or 2 mg/Kg of agonists or antagonists of the invention, or truncated forms thereof. Mice receive this treatment for 4 consecutive days, at which time they are sacrificed and various tissues and serum collected for analyses. Comparison of H&E sections from normal spleens and spleens treated with agonists or antagonists of the invention identify the results of the activity of the agonists or antagonists on spleen cells, such as the diffusion of peri-arterial lymphatic sheaths, and/or significant increases in the nucleated cellularity of the red pulp regions, which may indicate the activation of the differentiation and proliferation of B-cell populations. Immunohistochemical studies using a B cell marker, anti-CD45R(B220), are used to determine whether any physiological changes to splenic cells, such as splenic disorganization, are due to increased B-cell representation within loosely defined B-cell zones that infiltrate established T-cell regions.

[1266] Flow cytometric analyses of the spleens from mice treated with agonist or antagonist is used to indicate whether the agonists or antagonists specifically increases the proportion of ThB+, CD45R(B220)dull B cells over that which is observed in control mice.

[1267] Likewise, a predicted consequence of increased mature B-cell representation in vivo is a relative increase in serum Ig titers. Accordingly, serum IgM and IgA levels are compared between buffer and agonists or antagonists-treated mice.

[1268] The studies described in this example tested activity of agonists or antagonists of the invention. However, one skilled in the art could easily modify the exemplified studies to test the activity of polynucleotides or polypeptides of the invention (e.g., gene therapy).

### Example 22

### T Cell Proliferation Assay

[1269] A CD3-induced proliferation assay is performed on PBMCs and is measured by the uptake of ³H-thymidine. The assay is performed as follows. Ninety-six well plates are coated with 100 μl/well of mAb to CD3 (HIT3a, Pharmingen) or isotype-matched control mAb (B33.1) overnight at 4 degrees C. (1 μg/ml in .05M bicarbonate buffer, pH 9.5), then washed three times with PBS. PBMC are isolated by F/H gradient centrifugation from human peripheral blood and added to quadruplicate wells (5×10⁴/well) of mAb coated plates in RPMI containing 10% FCS and P/S in the presence of varying concentrations of agonists or antagonists of the invention (total volume 200 ul). Relevant protein buffer and medium alone are controls. After 48 hr. culture at 37 degrees C., plates are spun for 2 min. at 1000 rpm and 100 μl of supernatant is removed and stored −20 degrees C. for measurement of IL-2 (or other cytokines) if effect on proliferation is observed. Wells are supplemented with 100 ul of medium containing 0.5 uCi of ³H-thymidine and cultured at 37 degrees C. for 18-24 hr. Wells are harvested and incorporation of ³H-thymidine used as a measure of proliferation. Anti-CD3 alone is the positive control for proliferation. IL-2 (100 U/ml) is also used as a control which enhances proliferation. Control antibody which does not induce proliferation of T cells is used as the negative control for the effects of agonists or antagonists of the invention.

[1270] The studies described in this example tested activity of agonists or antagonists of the invention. However, one skilled in the art could easily modify the exemplified studies to test the activity of polynucleotides or polypeptides of the invention (e.g., gene therapy).

### Example 23

### Effect of Agonists or Antagonists of the Invention on the Expression of MHC Class II, Costimulatory and Adhesion Molecules and Cell Differentiation of Monocytes and Monocyte-Derived Human Dendritic Cells

[1271] Dendritic cells are generated by the expansion of proliferating precursors found in the peripheral blood: adherent PBMC or elutriated monocytic fractions are cultured for 7-10 days with GM-CSF (50 ng/ml) and IL-4 (20 ng/ml). These dendritic cells have the characteristic phenotype of immature cells (expression of CD1, CD80, CD86, CD40 and MHC class II antigens). Treatment with activating factors, such as TNF-α, causes a rapid change in surface phenotype (increased expression of MHC class I and II, costimulatory and adhesion molecules, downregulation of FCγRII, upregulation of CD83). These changes correlate with increased antigen-presenting capacity and with functional maturation of the dendritic cells.

[1272] FACS analysis of surface antigens is performed as follows. Cells are treated 1-3 days with increasing concentrations of agonist or antagonist of the invention or LPS (positive control), washed with PBS containing 1% BSA and 0.02 mM sodium azide, and then incubated with 1:20 dilution of appropriate FITC- or PE-labeled monoclonal antibodies for 30 minutes at 4 degrees C. After an additional wash, the labeled cells are analyzed by flow cytometry on a FACScan (Becton Dickinson).

[1273] Effect on the production of cytokines. Cytokines generated by dendritic cells, in particular IL-12, are important in the initiation of T-cell dependent immune responses. IL-12 strongly influences the development of Thl helper T-cell immune response, and induces cytotoxic T and NK cell function. An ELISA is used to measure the IL-12 release as follows. Dendritic cells (10⁶/ml) are treated with increasing concentrations of agonists or antagonists of the invention for 24 hours. LPS (100 ng/ml) is added to the cell culture as positive control. Supernatants from the cell cultures are. then collected and. analyzed for. IL-12 content using commercial ELISA kit (e.g., R & D Systems (Minneapolis, Minn.)). The standard protocols provided with the kits are used.

[1274] Effect on the expression of MHC Class II, costimulatory and adhesion molecules. Three major families of cell surface antigens can be identified on monocytes: adhesion molecules, molecules involved in antigen presentation, and Fc receptor. Modulation of the expression of MHC class II antigens and other costimulatory molecules, such as B7 and ICAM-1, may result in changes in the antigen presenting capacity of monocytes and ability to induce T cell activation. Increased expression of Fc receptors may correlate with improved monocyte cytotoxic activity, cytokine release and phagocytosis.

[1275] FACS analysis is used to examine the surface antigens as follows. Monocytes are treated 1-5 days with increasing concentrations of agonists or antagonists of the invention or LPS (positive control), washed with PBS containing 1% BSA and 0.02 mM sodium azide, and then incubated with 1:20 dilution of appropriate FITC- or PE-labeled monoclonal antibodies for 30 minutes at 4 degrees C. After an additional wash, the labeled cells are analyzed by flow cytometry on a FACScan (Becton Dickinson).

[1276] Monocyte activation and/or increased survival. Assays for molecules that activate (or alternatively, inactivate) monocytes and/or increase monocyte survival (or alternatively, decrease monocyte survival) are known in the art and may routinely be applied to determine whether a molecule of the invention functions as an inhibitor or activator of monocytes. Agonists or antagonists of the invention can be screened using the three assays described below. For each of these assays, Peripheral blood mononuclear cells (PBMC) are purified from single donor leukopacks (American Red Cross, Baltimore, Md.) by centrifugation through a Histopaque gradient (Sigma). Monocytes are isolated from PBMC by counterflow centrifugal elutriation.

[1277] Monocyte Survival Assay. Human peripheral blood monocytes progressively lose viability when cultured in absence of serum or other stimuli. Their death results from internally regulated processes (apoptosis). Addition to the culture of activating factors, such as TNF-alpha dramatically improves cell survival and prevents DNA fragmentation. Propidium iodide (PI) staining is used to measure apoptosis as follows. Monocytes are cultured for 48 hours in polypropylene tubes in serum-free medium (positive control), in the presence of 100 ng/ml TNF-alpha (negative control), and in the presence of varying concentrations of the compound to be tested. Cells are suspended at a concentration of 2×10⁶/ml in PBS containing PI at a final concentration of 5 μg/ml, and then incubated at room temperature for 5 minutes before FACScan analysis. PI uptake has been demonstrated to correlate with DNA fragmentation in this experimental paradigm.

[1278] Effect on cytokine release. An important function of monocytes/macrophages is their regulatory activity on other cellular populations of the immune system through the release of cytokines after stimulation. An ELISA to measure cytokine release is performed as follows. Human monocytes are incubated at a density of 5×10⁵ cells/ml with increasing concentrations of agonists or antagonists of the invention and under the same conditions, but in the absence of agonists or antagonists. For IL-12 production, the cells are primed overnight with IFN (100 U/ml) in the presence of agonist or antagonist of the invention. LPS (10 ng/ml) is then added. Conditioned media are collected after 24 h and kept frozen until use. Measurement of TNF-alpha, IL-10, MCP-1 and IL-8 is then performed using a commercially available ELISA kit (e.g., R & D Systems (Minneapolis, Minn.)) and applying the standard protocols provided with the kit.

[1279] Oxidative burst. Purified monocytes are plated in 96-w plate at 2-1×10⁵ cell/well. Increasing concentrations of agonists or antagonists of the invention are added to the wells in a total volume of 0.2 ml culture medium (RPMI 1640+10% FCS, glutamine and antibiotics). After 3 days incubation, the plates are centrifuged and the medium is removed from the wells. To the macrophage monolayers, 0.2 ml per well of phenol red solution (140 mM NaCl, 10 mM potassium phosphate buffer pH 7.0, 5.5 mM dextrose, 0.56 mM phenol red and 19 U/ml of HRPO) is added, together with the stimulant (200 nM PMA). The plates are incubated at 37° C. for 2 hours and the reaction is stopped by adding 20 μl 1N NaOH per well. The absorbance is read at 610 nm. To calculate the amount of H₂O₂ produced by the macrophages, a standard curve of a H₂O₂ solution of known molarity is performed for each experiment.

[1280] The studies described in this example tested activity of agonists or antagonists of the invention. However, one skilled in the art could easily modify the exemplified studies to test the activity of polynucleotides or polypeptides of the invention (e.g., gene therapy).

### Example 24

### Biological Effects of Agonists or Antagonists of the Invention

Astrocvte and Neuronal Assays.

[1281] Agonists or antagonists of the invention, expressed in Escherichia coli and purified as described above, can be tested for activity in promoting the survival, neurite outgrowth, or phenotypic differentiation of cortical neuronal cells and for inducing the proliferation of glial fibrillary acidic protein immunopositive cells, astrocytes. The selection of cortical cells for the bioassay is based on the prevalent expression of FGF-1 and FGF-2 in cortical structures and on the previously reported enhancement of cortical neuronal survival resulting from FGF-2 treatment. A thymidine incorporation assay, for example, can be used to elucidate an agonist or antagonist of the invention's activity on these cells.

[1282] Moreover, previous reports describing the biological effects of FGF-2 (basic FGF) on cortical or hippocampal neurons in vitro have demonstrated increases in both neuron survival and neurite outgrowth (Walicke et al., “Fibroblast growth factor promotes survival of dissociated hippocampal neurons and enhances neurite extension.” Proc. Natl. Acad. Sci. USA 83:3012-3016. (1986), assay herein incorporated by reference in its entirety). However, reports from experiments done on PC-12 cells suggest that these two responses are not necessarily synonymous and may depend on not only which FGF is being tested but also on which receptor(s) are expressed on the target cells. Using the primary cortical neuronal culture paradigm, the ability of an agonist or antagonist of the invention to induce neurite outgrowth can be compared to the response achieved with FGF-2 using, for example, a thymidine incorporation assay.

Fibroblast and Endothelial Cell Assays.

[1283] Human lung fibroblasts are obtained from Clonetics (San Diego, Calif.) and maintained in growth media from Clonetics. Dermal microvascular endothelial cells are obtained from Cell Applications (San Diego, Calif.). For proliferation assays, the human lung fibroblasts and dermal microvascular endothelial cells can be cultured at 5,000 cells/well in a 96-well plate for one day in growth medium. The cells are then incubated for one day in 0.1% BSA basal medium. After replacing the medium with fresh 0.1% BSA medium, the cells are incubated with the test proteins for 3 days. Alamar Blue (Alamar Biosciences, Sacramento, Calif.) is added to each well to a final concentration of 10% . The cells are incubated for 4 hr. Cell viability is measured by reading in a CytoFluor fluorescence reader. For the PGE₂ assays, the human lung fibroblasts are cultured at 5,000 cells/well in a 96-well plate for one day. After a medium change to 0.1% BSA basal medium, the cells are incubated with FGF-2 or agonists or antagonists of the invention with or without IL-1α for 24 hours. The supernatants are collected and assayed for PGE₂ by EIA kit (Cayman, Ann Arbor, Mich.). For the IL-6 assays, the human lung fibroblasts are cultured at 5,000 cells/well in a 96-well plate for one day. After a medium change to 0.1% BSA basal medium, the cells are incubated with FGF-2 or with or without agonists or antagonists of the invention IL-1α for 24 hours. The supernatants are collected and assayed for IL-6 by ELISA kit (Endogen, Cambridge, Mass.).

[1284] Human lung fibroblasts are cultured with FGF-2 or agonists or antagonists of the invention for 3 days in basal medium before the addition of Alamar Blue to assess effects on growth of the fibroblasts. FGF-2 should show a stimulation at 10-2500 ng/ml which can be used to compare stimulation with agonists or antagonists of the invention.

Parkinson Models.

[1285] The loss of motor function in Parkinson's disease is attributed to a deficiency of striatal dopamine resulting from the degeneration of the nigrostriatal dopaminergic projection neurons. An animal model for Parkinson's that has been extensively characterized involves the systemic administration of 1-methyl-4 phenyl 1,2,3,6-tetrahydropyridine (MPTP). In the CNS, MPTP is taken-up by astrocytes and catabolized by monoamine oxidase B to 1-methyl-4-phenyl pyridine (MPP⁺) and released. Subsequently, MPP⁺ is actively accumulated in dopaminergic neurons by the high-affinity reuptake transporter for dopamine. MPP⁺ is then concentrated in mitochondria by the electrochemical gradient and selectively inhibits nicotidamide adenine disphosphate: ubiquinone oxidoreductionase (complex I), thereby interfering with electron transport and eventually-generating oxygen radicals.

[1286] It has been demonstrated in tissue culture paradigms that FGF-2 (basic FGF) has trophic activity towards nigral dopaminergic neurons (Ferrari et al., Dev. Biol. 1989). Recently, Dr. Unsicker's group has demonstrated that administering FGF-2 in gel foam implants in the striatum results in the near complete protection of nigral dopaminergic neurons from the toxicity associated with MPTP exposure (Otto and Unsicker, J. Neuroscience, 1990).

[1287] Based on the data with FGF-2, agonists or antagonists of the invention can be evaluated to determine whether it has an action similar to that of FGF-2 in enhancing dopaminergic neuronal survival in vitro and it can also be tested in vivo for protection of dopaminergic neurons in the striatum from the damage associated with MPTP treatment. The potential effect of an agonist or antagonist of the invention is first examined in vitro in a dopaminergic neuronal cell culture paradigm. The cultures are prepared by dissecting the midbrain floor plate from gestation day 14 Wistar rat embryos. The tissue is dissociated with trypsin and seeded at a density of 200,000 cells/cm² on polyorthinine-laminin coated glass coverslips. The cells are maintained in Dulbecco's Modified Eagle's medium and F12 medium containing hormonal supplements (N1). The cultures are fixed with paraformaldehyde after 8 days in vitro and are processed for tyrosine hydroxylase, a specific marker for dopaminergic neurons, immunohistochemical staining. Dissociated cell cultures are prepared from embryonic rats. The culture medium is changed every third day and the factors are also added at that time.

[1288] Since the dopaminergic neurons are isolated from animals at gestation day 14, a developmental time which is past the stage when the dopaminergic precursor cells are proliferating, an increase in the number of tyrosine hydroxylase immunopositive neurons would represent an increase in the number of dopaminergic neurons surviving in vitro. Therefore, if an agonist or antagonist of the invention acts to prolong the survival of dopaminergic neurons, it would suggest that the agonist or antagonist may be involved in Parkinson's Disease.

[1289] The studies described in this example tested activity of agonists or antagonists of the invention. However, one skilled in the art could easily modify the exemplified studies to test the activity of polynucleotides or polypeptides of the invention (e.g., gene therapy).

### Example 25

### The Effect of Agonists or Antagonists of the Invention on the Growth of Vascular Endothelial Cells

[1290] On day 1, human umbilical vein endothelial cells (HUVEC) are seeded at 2-5×10⁴ cells/35 mm dish density in M199 medium containing 4% fetal bovine serum (FBS), 16 units/ml heparin, and 50 units/ml endothelial cell growth supplements (ECGS, Biotechnique, Inc.). On day 2, the medium is replaced with M199 containing 10% FBS, 8 units/ml heparin. An agonist or antagonist of the invention, and positive controls, such as VEGF and basic FGF (bFGF) are added, at varying concentrations. On days 4 and 6, the medium is replaced. On day 8, cell number is determined with a Coulter Counter.

[1291] An increase in the number of HUVEC cells indicates that the compound of the invention may proliferate vascular endothelial cells, while a decrease in the number of HUVEC cells indicates that the compound of the invention inhibits vascular endothelial cells.

[1292] The studies described in this example tested activity of a polypeptide of the invention. However, one skilled in the art could easily modify the exemplified studies to test the activity of polynucleotides (e.g., gene therapy), agonists, and/or antagonists of the invention.

### Example 26

### Rat Corneal Wound Healing Model

[1293] This animal model shows the effect of an agonist or antagonist of the invention on neovascularization. The experimental protocol includes:

[1294] Making a 1-1.5 mm long incision from the center of cornea into the stromal layer.

[1295] Inserting a spatula below the lip of the incision facing the outer corner of the eye.

[1296] Making a pocket (its base is 1-1.5 mm form the edge of the eye).

[1297] Positioning a pellet, containing 50 ng-5 ug of an agonist or antagonist of the invention, within the pocket.

[1298] Treatment with an agonist or antagonist of the invention can also be applied topically to the comeal wounds in a dosage range of 20 mg-500 mg (daily treatment for five days).

[1299] The studies described in this example tested activity of agonists or antagonists of the invention. However, one skilled in the art could easily modify the exemplified studies to test the activity of polynucleotides or polypeptides of the invention (e.g., gene therapy).

### Example 27

### Diabetic Mouse and Glucocorticoid-Impaired

Wound Healing Models

Diabetic db+/db+Mouse Model.

[1300] To demonstrate that an agonist or antagonist of the invention accelerates the healing process, the genetically diabetic mouse model of wound healing is used. The full thickness wound healing model in the db+/db+ mouse is a well characterized, clinically relevant and reproducible model of impaired wound healing. Healing of the diabetic wound is dependent on formation of granulation tissue and re-epithelialization rather than contraction (Gartner, M. H. et al., J. Surg. Res. 52:389 (1992); Greenhalgh, D. G. et al., Am. J. PathoL 136:1235 (1990)).

[1301] The diabetic animals have many of the characteristic features observed in Type II diabetes mellitus. Homozygous (db+/db+) mice are obese in comparison to their normal heterozygous (db+/+m) littermates. Mutant diabetic (db+/db+) mice have a single autosomal recessive mutation on chromosome 4 (db+) (Coleman et al. Proc. Natl. Acad. Sci. USA 77:283-293 (1982)). Animals show polyphagia, polydipsia and polyuria. Mutant diabetic mice (db+/db+) have elevated blood glucose, increased or normal insulin levels, and suppressed cell-mediated immunity (Mandel et al., J. Immunol. 120:1375 (1978); Debray-Sachs, M. et al, Clin. Exp. Immunol. 51(1):1-7 (1983); Leiter et al., Am. J. of Pathol. 114:46-55 (1985)). Peripheral neuropathy, myocardial complications, and microvascular lesions, basement membrane thickening and glomerular filtration abnormalities have been described in these animals (Norido, F. et al., Exp. Neurol. 83(2):221-232 (1984); Robertson et al., Diabetes 29(1):60-67 (1980); Giacomelli et al., Lab Invest. 40(4):460-473 (1979); Coleman, D. L., Diabetes 31 (Suppl): 1-6 (1982)). These homozygous diabetic mice develop hyperglycemia that is resistant to insulin analogous to human type II diabetes (Mandel et al., J. Immunol. 120:1375-1377 (1978)).

[1302] The characteristics observed in these animals suggests that healing in this model may be similar to the healing observed in human diabetes (Greenhalgh, et al., Am. J. of Pathol. 136:1235-1246 (1990)).

[1303] Genetically diabetic female C57BL/KsJ (db+/db+) mice and their non-diabetic (db+/+m) heterozygous littermates are used in this study (Jackson Laboratories). The animals are purchased at 6 weeks of age and are 8 weeks old at the beginning of the study. Animals are individually housed and received food and water ad libitum. All manipulations are performed using aseptic techniques. The experiments are conducted according to the rules and guidelines of Human Genome Sciences, Inc. Institutional Animal Care and Use Committee and the Guidelines for the Care and Use of Laboratory Animals.

[1304] Wounding protocol is performed according to previously reported methods (Tsuboi, R. and Rifkin, D. B., J. Exp. Med. 172:245-251 (1990)). Briefly, on the day of wounding, animals are anesthetized with an intraperitoneal injection of Avertin (0.01 mg/mL), 2,2,2-tribromoethanol and 2-methyl-2-butanol dissolved in deionized water. The dorsal region of the animal is shaved and the skin washed with 70% ethanol solution and iodine. The surgical area is dried with sterile gauze prior to wounding. An 8 mm full-thickness wound is then created using a Keyes tissue punch. Immediately following wounding, the surrounding skin is gently stretched to eliminate wound expansion. The wounds are left open for the duration of the experiment. Application of the treatment is given topically for 5 consecutive days commencing on the day of wounding. Prior to treatment, wounds are gently cleansed with sterile saline and gauze sponges.

[1305] Wounds are visually examined and photographed at a fixed distance at the day of surgery and at two day intervals thereafter. Wound closure is determined by daily measurement on days 1-5 and on day 8. Wounds are measured horizontally and vertically using a calibrated Jameson caliper. Wounds are considered healed if granulation tissue is no longer visible and the wound is covered by a continuous epithelium.

[1306] An agonist or antagonist of the invention is administered using at a range different doses, from 4 mg to 500 mg per wound per day for 8 days in vehicle. Vehicle control groups received 50 mL of vehicle solution.

[1307] Animals are euthanized on day 8 with an intraperitoneal injection of sodium pentobarbital (300 mg/kg). The wounds and surrounding skin are then harvested for histology and immunohistochemistry. Tissue specimens are placed in 10% neutral buffered formalin in tissue cassettes between biopsy sponges for further processing.

[1308] Three groups of 10 animals each (5 diabetic and 5 non-diabetic controls) are evaluated: 1) Vehicle placebo control, 2) untreated group, and 3) treated group.

[1309] Wound closure is analyzed by measuring the area in the vertical and horizontal axis and obtaining the total square area of the wound. Contraction is then estimated by establishing the differences between the initial wound area (day 0) and that of post treatment (day 8). The wound area on day 1 is 64 mm², the corresponding size of the dermal punch. Calculations are made using the following formula:
[Open area on day 8]−[Open area on day 1]/[Open area on day 1]

[1310] Specimens are fixed in 10% buffered formalin and paraffin embedded blocks are sectioned perpendicular to the wound surface (5 mm) and cut using a Reichert-Jung microtome. Routine hematoxylin-eosin (H&E) staining is performed on cross-sections of bisected wounds. Histologic examination of the wounds are used to assess whether the healing process and the morphologic appearance of the repaired skin is altered by treatment with an agonist or antagonist of the invention. This assessment included verification of the presence of cell accumulation, inflammatory cells, capillaries, fibroblasts, re-epithelialization and epidermal maturity (Greenhalgh, D. G. et al., Am. J. Pathol. 136:1235 (1990)). A calibrated lens micrometer is used by a blinded observer.

[1311] Tissue sections are also stained immunohistochemically with a polyclonal rabbit anti-human keratin antibody using ABC Elite detection system. Human skin is used as a positive tissue control while non-immune IgG is used as a negative control. Keratinocyte growth is determined by evaluating the extent of reepithelialization of the wound using a calibrated lens micrometer.

[1312] Proliferating cell nuclear antigen/cyclin (PCNA) in skin specimens is demonstrated by using anti-PCNA antibody (1:50) with an ABC Elite detection system. Human colon cancer served as a positive tissue control and human brain tissue is used as a negative tissue control. Each specimen included a section with omission of the primary antibody and substitution with non-immune mouse IgG. Ranking of these sections is based on the extent of proliferation on a scale of 0-8, the lower side of the scale reflecting slight proliferation to the higher side reflecting intense proliferation.

[1313] Experimental data are analyzed using an unpaired t test. A p value of <0.05 is considered significant.

Steroid Impaired Rat Model

[1314] The inhibition of wound healing by steroids has been well documented in various in vitro and in vivo systems (Wahl, Glucocorticoids and Wound healing. In: Anti-Inflammatory Steroid Action: Basic and Clinical Aspects. 280-302 (1989); Wahlet al, J. Immunol. 115: 476-481 (1975); Werb et al., J. Exp. Med. 147:1684-1694 (1978)). Glucocorticoids retard wound healing by inhibiting angiogenesis, decreasing vascular permeability (Ebert et al., An. Intern. Med. 37:701-705 (1952)), fibroblast proliferation, and collagen synthesis (Beck et al, Growth Factors. 5: 295-304 (1991); Haynes et al., J. Clin. Invest. 61: 703-797 (1978)) and producing a transient reduction of circulating monocytes (Haynes et al., J. Clin. Invest. 61: 703-797 (1978); Wahl, “Glucocorticoids and wound healing”, In: Antiinflammatory Steroid Action: Basic and Clinical Aspects, Academic Press, New York, pp. 280-302 (1989)). The systemic administration of steroids to impaired wound healing is a well establish phenomenon in rats (Beck et al., Growth Factors. 5: 295-304 (1991); Haynes et al., J. Clin. Invest. 61: 703-797 (1978); Wahl, “Glucocorticoids and wound healing”, In: Antiinflammatory Steroid Action: Basic and Clinical Aspects, Academic Press, New York, pp. 280-302 (1989); Pierce et al., Proc. Natl. Acad. Sci. USA 86: 2229-2233 (1989)).

[1315] To demonstrate that an agonist or antagonist of the invention can accelerate the healing process, the effects of multiple topical applications of the agonist or antagonist on full thickness excisional skin wounds in rats in which healing has been impaired by the systemic administration of methylprednisolone is assessed.

[1316] Young adult male Sprague Dawley rats weighing 250-300 g (Charles River Laboratories) are used in this example. The animals are purchased at 8 weeks of age and are 9 weeks old at the beginning of the study. The healing response of rats is impaired by the systemic administration of methylprednisolone (17 mg/kg/rat intramuscularly) at the time of wounding. Animals are individually housed and received food and water ad libitum. All manipulations are performed using aseptic techniques. This study is conducted according to the rules and guidelines of Human Genome Sciences, Inc. Institutional Animal Care and Use Committee and the Guidelines for the Care and Use of Laboratory Animals.

[1317] The wounding protocol is followed according to section A, above. On the day of wounding, animals are anesthetized with an intramuscular injection of ketamine (50 mg/kg) and xylazine (5 mg/kg). The dorsal region of the animal is shaved and the skin washed with 70% ethanol and iodine solutions. The surgical area is dried with sterile gauze prior to wounding. An 8 mm full-thickness wound is created using a Keyes tissue punch. The wounds are left open for the duration of the experiment. Applications of the testing materials are given topically once a day for 7 consecutive days commencing on the day of wounding and subsequent to methylprednisolone administration. Prior to treatment, wounds are gently cleansed with sterile saline and gauze sponges.

[1318] Wounds are visually examined and photographed at a fixed distance at the day of wounding and at the end of treatment. Wound closure is determined by daily measurement on days 1-5 and on day 8. Wounds are measured horizontally and vertically using a calibrated Jameson caliper. Wounds are considered healed if granulation tissue is no longer visible and the wound is covered by a continuous epithelium.

[1319] The agonist or antagonist of the invention is administered using at a range different doses, from 4 mg to 500 mg per wound per day for 8 days in vehicle. Vehicle control groups received 50 mL of vehicle solution.

[1320] Animals are euthanized on day 8 with an intraperitoneal injection of sodium pentobarbital (300 mg/kg). The wounds and surrounding skin are then harvested for histology. Tissue specimens are placed in 10% neutral buffered formalin in tissue cassettes between biopsy sponges for further processing.

[1321] Three groups of 10 animals each (5 with methylprednisolone and 5 without glucocorticoid) are evaluated: 1) Untreated group 2) Vehicle placebo control 3) treated groups.

[1322] Wound closure is analyzed by measuring the area in the vertical and horizontal axis and obtaining the total area of the wound. Closure is then estimated by establishing the differences between the initial wound area (day 0) and that of post treatment (day 8). The wound area on day 1 is 64 mm², the corresponding size of the dermal punch. Calculations are made using the following formula:
[Open area on day 8]-[Open area on day 1]/[Open area on day 1]

[1323] Specimens are fixed in 10% buffered formalin and paraffin embedded blocks are sectioned perpendicular to the wound surface (5 mm) and cut using an Olympus microtome. Routine hematoxylin-eosin (H&E) staining is performed on cross-sections of bisected wounds. Histologic examination of the wounds allows assessment of whether the healing process and the morphologic appearance of the repaired skin is improved by treatment with an agonist or antagonist of the invention. A calibrated lens micrometer is used by a blinded observer to determine the distance of the wound gap.

[1324] Experimental data are analyzed using an unpaired t test. A p value of <0.05 is considered significant.

[1325] The studies described in this example tested activity of agonists or antagonists of the invention. However, one skilled in the art could easily modify the exemplified studies to test the activity of polynucleotides or polypeptides of the invention (e.g., gene therapy).

### Example 28

### Lymphadema Animal Model

[1326] The purpose of this experimental approach is to create an appropriate and consistent lymphedema model for testing the therapeutic effects of an agonist or antagonist of the invention in lymphangiogenesis and re-establishment of the lymphatic circulatory system in the rat hind limb. Effectiveness is measured by swelling volume of the affected limb, quantification of the amount of lymphatic vasculature, total blood plasma protein, and histopathology. Acute lymphedema is observed for 7-10 days. Perhaps more importantly, the chronic progress of the edema is followed for up to 3-4 weeks.

[1327] Prior to beginning surgery, blood sample is drawn for protein concentration analysis. Male rats weighing approximately ˜350 g are dosed with Pentobarbital. Subsequently, the right legs are shaved from knee to hip. The shaved area is swabbed with gauze soaked in 70% EtOH. Blood is drawn for serum total protein testing. Circumference and volumetric measurements are made prior to injecting dye into paws after marking 2 measurement levels (0.5 cm above heel, at mid-pt of dorsal paw). The intradermal dorsum of both right and left paws are injected with 0.05 ml of 1% Evan's Blue. Circumference and volumetric measurements are then made following injection of dye into paws.

[1328] Using the knee joint as a landmark, a mid-leg inguinal incision is made circumferentially allowing the femoral vessels to be located. Forceps and hemostats are used to dissect and separate the skin flaps. After locating the femoral vessels, the lymphatic vessel that runs along side and underneath the vessel(s) is located. The main lymphatic vessels in this area are then electrically coagulated or suture ligated.

[1329] Using a microscope, muscles in back of the leg (near the semitendinosis and adductors) are bluntly dissected. The popliteal lymph node is then located. The 2 proximal and 2 distal lymphatic vessels and distal blood supply of the popliteal node are then ligated by suturing. The popliteal lymph node, and any accompanying adipose tissue, is then removed by cutting connective tissues.

[1330] Care is taken to control any mild bleeding resulting from this procedure. After lymphatics are occluded, the skin flaps are sealed by using liquid skin (Vetbond) (AJ Buck). The separated skin edges are sealed to the underlying muscle tissue while leaving a gap of ˜0.5 cm around the leg. Skin also may be anchored by suturing to underlying muscle when necessary.

[1331] To avoid infection, animals are housed individually with mesh (no bedding). Recovering animals are checked daily through the optimal edematous peak, which typically occurred by day 5-7. The plateau edematous peak are then observed. To evaluate the intensity of the lymphedema, the circumference and volumes of 2 designated places on each paw before operation and daily for 7 days are measured. The effect of plasma proteins on lymphedema is determined and whether protein analysis is a useful testing perimeter is also investigated. The weights of both control and edematous limbs are evaluated at 2 places. Analysis is performed in a blind manner.

[1332] Circumference Measurements: Under brief gas anesthetic to prevent limb movement, a cloth tape is used to measure limb circumference. Measurements are done at the ankle bone and dorsal paw by 2 different people and those 2 readings are averaged. Readings are taken from both control and edematous limbs.

[1333] Volumetric Measurements: On the day of surgery, animals are anesthetized with Pentobarbital and are tested prior to surgery. For daily volumetrics animals are under brief halothane anesthetic (rapid immobilization and quick recovery), and both legs are shaved and equally marked using waterproof marker on legs. Legs are first dipped in water, then dipped into instrument to each marked level then measured by Buxco edema software(Chen/Victor). Data is recorded by one person, while the other is dipping the limb to marked area.

[1334] Blood-plasma protein measurements: Blood is drawn, spun, and serum separated prior to surgery and then at conclusion for total protein and Ca2⁺ comparison.

[1335] Limb Weight Comparison: After drawing blood, the animal is prepared for tissue collection. The limbs are amputated using a quillitine, then both experimental and control legs are cut at the ligature and weighed. A second weighing is done as the tibio-cacaneal joint is disarticulated and the foot is weighed.

[1336] Histological Preparations: The transverse muscle located behind the knee (popliteal) area is dissected and arranged in a metal mold, filled with freezeGel, dipped into cold methylbutane, placed into labeled sample bags at −80 EC until sectioning. Upon sectioning, the muscle is observed under fluorescent microscopy for lymphatics.

[1337] The studies described in this example tested activity of agonists or antagonists of the invention. However, one skilled in the art could easily modify the exemplified studies to test the activity of polynucleotides or polypeptides of the invention (e.g., gene therapy).

### Example 29

### Suppression of TNF Alpha-Induced Adhesion Molecule Expression by an Agonist or Antagonist of the Invention

[1338] The recruitment of-lymphocytes to areas of inflammation and angiogenesis involves specific receptor-ligand interactions between cell surface adhesion molecules (CAMs) on lymphocytes and the vascular endothelium. The adhesion process, in both normal and pathological settings, follows a multi-step cascade that involves intercellular adhesion molecule-1 (ICAM-1), vascular cell adhesion molecule-1 (VCAM-1), and endothelial leukocyte adhesion molecule-1 (E-selectin) expression on endothelial cells (EC). The expression of these molecules and others on the vascular endothelium determines the efficiency with which leukocytes may adhere to the local vasculature and extravasate into the local tissue during the development of an inflammatory response. The local concentration of cytokines and growth factor participate in the modulation of the expression of these CAMs.

[1339] Tumor necrosis factor alpha (TNF-a), a potent proinflammatory cytokine, is a stimulator of all three CAMs on endothelial cells and may be involved in a wide variety of inflammatory responses, often resulting in a pathological outcome.

[1340] The potential of an agonist or antagonist of the invention to mediate a suppression of TNF-a induced CAM expression can be examined. A modified ELISA assay which uses ECs as a solid phase absorbent is employed to measure the amount of CAM expression on TNF-a treated ECs when co-stimulated with a member of the FGF family of proteins.

[1341] To perform the experiment, human umbilical vein endothelial cell (HUVEC) cultures are obtained from pooled cord harvests and maintained in growth medium (EGM-2; Clonetics, San Diego, Calif.) supplemented with 10% FCS and 1% penicillin/streptomycin in a 37 degree C. humidified incubator containing 5% CO₂. HUVECs are seeded in 96-well plates at concentrations of 1×10⁴ cells/well in EGM medium at 37 degree C. for 18-24 hrs or until confluent. The monolayers are subsequently washed 3 times with a serum-free solution of RPMI-1640 supplemented with 100 U/ml penicillin and 100 mg/ml streptomycin, and treated with a given cytokine and/or growth factor(s) for 24 h at 37 degree C. Following incubation, the cells are then evaluated for CAM expression.

[1342] Human Umbilical Vein Endothelial cells (HUVECs) are grown in a standard 96 well plate to confluence. Growth medium is removed from the cells and replaced with 90 ul of 199 Medium (10% FBS). Samples for testing and positive or negative controls are added to the plate in triplicate (in 10 ul volumes). Plates are incubated at 37 degree C. for either 5 h (selectin and integrin expression) or 24 h (integrin expression only). Plates are aspirated to remove medium and 100 μl of 0.1% paraformaldehyde-PBS(with Ca++ and Mg++) is added to each well. Plates are held at 4° C. for 30 min.

[1343] Fixative is then removed from the wells and wells are washed 1× with PBS(+Ca,Mg)+0.5% BSA and drained. Do not allow the wells to dry. Add 10 μl of diluted primary antibody to the test and control wells. Anti-ICAM-1-Biotin, Anti-VCAM-1-Biotin and Anti-E-selectin-Biotin are used at a concentration of 10 μg/ml (1:10 dilution of 0.1 mg/ml stock antibody). Cells are incubated at 37° C. for 30 min. in a humidified environment. Wells are washed ×3 with PBS(+Ca,Mg)+0.5% BSA.

[1344] Then add 20 μl of diluted ExtrAvidin-Alkaline Phosphotase (1:5,000 dilution) to each well and incubated at 37° C. for 30 min. Wells are washed X3 with PBS(+Ca,Mg)+0.5% BSA. 1 tablet of p-Nitrophenol Phosphate pNPP is dissolved in 5 ml of glycine buffer (pH 10.4). 100 μl of pNPP substrate in glycine buffer is added to each test well. Standard wells in triplicate are prepared from the working dilution of the ExtrAvidin-Alkaline Phosphotase in glycine buffer: 1:5,000 (10⁰)>10^{-0.5}>10⁻¹>10^{-1.5} .5 μl of dilution is added to triplicate wells and the resulting AP content in each well is 5.50 ng, 1.74 ng, 0.55 ng, 0.18 ng. 100 μl of pNNP reagent must then be added to each of the standard wells. The plate must be incubated at 37° C. for 4 h. A volume of 50 μl of 3M NaOH is added to all wells. The results are quantified on a plate reader at 405 nm. The background subtraction option is used on blank wells filled with glycine buffer only. The template is set up to indicate the concentration of AP-conjugate in each standard well [5.50 ng; 1.74 ng; 0.55 ng; 0.18 ng]. Results are indicated as amount of bound AP-conjugate. in each sample.

[1345] The studies described in this example tested activity of agonists or antagonists of the invention. However, one skilled in the art could easily modify the exemplified studies to test the activity of polynucleotides or polypeptides of the invention (e.g., gene therapy).

### Example 30

### Production of Polypeptide of the Invention for High-Throughput

Screening Assays

[1346] The following protocol produces a supernatant containing polypeptide of the present invention to be tested. This supernatant can then be used in the Screening Assays described in Examples 32-41.

[1347] First, dilute Poly-D-Lysine (644 587 Boehringer-Mannheim) stock solution (1 mg/ml in PBS) 1:20 in PBS (w/o calcium or magnesium 17-516F Biowhittaker) for a working solution of 50 ug/ml. Add 200 ul of this solution to each well (24 well plates) and incubate at RT for 20 minutes. Be sure to distribute the solution over each well (note: a 12-channel pipetter may be used with tips on every other channel). Aspirate off the Poly-D-Lysine solution and rinse with 1 ml PBS (Phosphate Buffered Saline). The PBS should remain in the well until just prior to plating the cells and plates may be poly-lysine coated in advance for up to two weeks.

[1348] Plate 293T cells (do not carry cells past P+20) at 2×10⁵ cells/well in 0.5 ml DMEM(Dulbecco's Modified Eagle Medium)(with 4.5 G/L glucose and L-glutamine (12-604F Biowhittaker))/10% heat inactivated FBS(14-503F Biowhittaker)/1× Penstrep(17-602E Biowhittaker). Let the cells grow overnight.

[1349] The next day, mix together in a sterile solution basin: 300 ul Lipofectamine (18324-012 Gibco/BRL) and 5 ml Optimem I (31985070 Gibco/BRL)/96-well plate. With a small volume multi-channel pipetter, aliquot approximately 2 ug of an expression vector containing a polynucleotide insert, produced by the methods described in Examples 8-10, into an appropriately labeled 96-well round bottom plate. With a multi-channel pipetter, add 50 ul of the Lipofectamine/Optimem I mixture to each well. Pipette up and down gently to mix. Incubate at RT 15-45 minutes. After about 20 minutes, use a multi-channel pipetter to add 150 ul Optimem I to each well. As a control, one plate of vector DNA lacking an insert should be transfected with each set of transfections.

[1350] Preferably, the transfection should be performed by tag-teaming the following tasks. By tag-teaming, hands on time is cut in half, and the cells do not spend too much time on PBS. First, person A aspirates off the media from four 24-well plates of cells, and then person B rinses each well with 0.5-1 ml PBS. Person A then aspirates off PBS rinse, and person B, using a12-channel pipetter with tips on every other channel, adds the 200 ul of DNA/Lipofectamine/Optimem I complex to the odd wells first, then to the even wells, to each row on the 24-well plates. Incubate at 37 degree C. for 6 hours.

[1351] While cells are incubating, prepare appropriate media, either 1% BSA in DMEM with 1× penstrep, or HGS CHO-5 media (116.6 mg/L of CaC12 (anhyd); 0.00130 mg/L CuSO₄-5H₂O; 0.050 mg/L of Fe(NO₃)₃-9H₂O; 0.417 mg/L of FeSO₄-7H₂O; 311.80 mg/L of Kcl; 28.64 mg/L of MgCl₂; 48.84 mg/L of MgSO₄; 6995.50 mg/L of NaCl; 2400.0 mg/L of NaHCO₃; 62.50 mg/L of NaH₂PO₄-H₂O; 71.02 mg/L of Na₂HPO4; 0.4320 mg/L of ZnSO₄-7H₂O; 0.002 mg/L of Arachidonic Acid; 1.022 mg/L of Cholesterol; 0.070 mg/L of DL-alpha-Tocopherol-Acetate; 0.0520 mg/L of Linoleic Acid; 0.010 mg/L of Linolenic Acid; 0.010 mg/L of Myristic Acid; 0.010 mg/L of Oleic Acid; 0.010 mg/L of Palmitric Acid; 0.010 mg/L of Palmitic Acid; 100 mg/L of Pluronic F-68; 0.010 mg/L of Stearic Acid; 2.20 mg/L of Tween 80; 4551 mg/L of D-Glucose; 130.85 mg/ml of L-Alanine; 147.50 mg/ml of L-Arginine-HCL; 7.50 mg/ml of L-Asparagine-H₂O; 6.65 mg/ml of L-Aspartic Acid; 29.56 mg/ml of L-Cystine-2HCL-H₂O; 31.29 mg/ml of L-Cystine-2HCL; 7.35 mg/ml of L-Glutamic Acid; 365.0 mg/ml of L-Glutamine; 18.75 mg/ml of Glycine; 52.48 mg/ml of L-Histidine-HCL-H₂O; 106.97 mg/ml of L-Isoleucine; 111.45 mg/ml of L-Leucine; 163.75 mg/ml of L-Lysine HCL; 32.34 mg/ml of L-Methionine; 68.48 mg/ml of L-Phenylalainine; 40.0 mg/ml of L-Proline; 26.25 mg/ml of L-Serine; 101.05 mg/ml of L-Threonine; 19.22 mg/ml of L-Tryptophan; 91.79 mg/ml of L-Tryrosine-2Na-2H₂O; and 99.65 mg/ml of L-Valine; 0.0035 mg/L of Biotin; 3.24 mg/L of D-Ca Pantothenate; 11.78 mg/L of Choline Chloride; 4.65 mg/L of Folic Acid; 15.60 mg/L of i-Inositol; 3.02 mg/L of Niacinamide; 3.00 mg/L of Pyridoxal HCL; 0.031 mg/L of Pyridoxine HCL; 0.319 mg/L of Riboflavin; 3.17 mg/L of Thiamine HCL; 0.365 mg/L of Thymidine; 0.680 mg/L of Vitamin B₁₂; 25 mM of HEPES Buffer; 2.39 mg/L of Na Hypoxanthine; 0.105 mg/L of Lipoic Acid; 0.081 mg/L of Sodium Putrescine-2HCL; 55.0 mg/L of Sodium Pyruvate; 0.0067 mg/L of Sodium Selenite; 20 uM of Ethanolamine; 0.122 mg/L of Ferric Citrate; 41.70 mg/L of Methyl-B-Cyclodextrin complexed with Linoleic Acid; 33.33 mg/L of Methyl-B-Cyclodextrin complexed with Oleic Acid; 10 mg/L of Methyl-B-Cyclodextrin complexed with Retinal Acetate. Adjust osmolarity to 327 mOsm) with 2 mm glutamine and 1× penstrep. (BSA (81-068-3 Bayer) 100 gm dissolved in 1 L DMEM for a 10% BSA stock solution). Filter the media and collect 50 ul for endotoxin assay in 15 ml polystyrene conical.

[1352] The transfection reaction is terminated, preferably by tag-teaming, at the end of the incubation period. Person A aspirates off the transfection media, while person B adds 1.5 ml appropriate media to each well. Incubate at 37 degree C. for 45 or 72 hours depending on the media used: 1% BSA for 45 hours or CHO-5 for 72 hours.

[1353] On day four, using a 300 ul multichannel pipetter, aliquot 600 ul in one 1 ml deep well plate and the remaining supernatant into a 2 ml deep well. The supernatants from each well can then be used in the assays described in Examples 32-39.

[1354] It is specifically understood that when activity is obtained in any of the assays described below using a supernatant, the activity originates from either the polypeptide of the present invention directly (e.g., as a secreted protein) or by polypeptide of the present invention inducing expression of other proteins, which are then secreted into the supernatant. Thus, the invention further provides a method of identifying the protein in the supernatant characterized by an activity in a particular assay.

### Example 31

### Construction of GAS Reporter Construct

[1355] One signal transduction pathway involved in the differentiation and proliferation of cells is called the Jaks-STATs pathway. Activated proteins in the Jaks-STATs pathway bind to gamma activation site “GAS” elements or interferon-sensitive responsive element (“ISRE”), located in the promoter of many genes. The binding of a protein to these elements alter the expression of the associated gene.

[1356] GAS and ISRE elements are recognized by a class of transcription factors called Signal Transducers and Activators of Transcription, or “STATs.” There are six members of the STATs family. Statl and Stat3 are present in many cell types, as is Stat2 (as response to IFN-alpha is widespread). Stat4 is more restricted and is not in many cell types though it has been found in T helper class I, cells after treatment with IL-12. Stat5 was originally called mammary growth factor, but has been found at higher concentrations in other cells including myeloid cells. It can be activated in tissue culture cells by many cytokines.

[1357] The STATs are activated to translocate from the cytoplasm to the nucleus upon tyrosine phosphorylation by a set of kinases known as the Janus Kinase (“Jaks”) family. Jaks represent a distinct family of soluble tyrosine kinases and include Tyk2, Jak1, Jak2, and Jak3. These kinases display significant sequence similarity and are generally catalytically inactive in resting cells.

[1358] The Jaks are activated by a wide range of receptors summarized in the Table below. (Adapted from review by Schidler and Darnell, Ann. Rev. Biochem. 64:621-51 (1995)). A cytokine receptor family, capable of activating Jaks, is divided into two groups: (a) Class 1 includes receptors for IL-2, IL-3, IL-4, IL-6, IL-7, IL-9, IL-11, IL-12, IL-15, Epo, PRL, GH, G-CSF, GM-CSF, LIF, CNTF, and thrombopoietin; and (b) Class 2 includes IFN-a, IFN-g, and IL-10. The Class 1 receptors share a conserved cysteine motif (a set of four conserved cysteines and one tryptophan) and a WSXWS motif (a membrane proximal region encoding Trp-Ser-Xaa-Trp-Ser (SEQ ID NO: 2)).

[1359] Thus, on binding of a ligand to a receptor, Jaks are activated, which in turn activate STATs, which then translocate and bind to GAS elements. This entire process is encompassed in the Jaks-STATs signal transduction pathway. Therefore, activation of the Jaks-STATs pathway, reflected by the binding of the GAS or the ISRE element, can be used to indicate proteins involved in the proliferation and differentiation of cells. For example, growth factors and cytokines are known to activate the Jaks-STATs pathway (See Table below). Thus, by using GAS elements linked to reporter molecules, activators of the Jaks-STATs pathway can be identified.

| | | JAKs | | | | |
|---|---|---|---|---|---|---|
| Ligand | tyk2 | Jak1 | Jak2 | Jak3 | STATS | GAS(elements) or ISRE |
| IFN family | | | | | | |
| IFN-a/B | + | + | − | − | 1, 2, 3 | ISRE |
| IFN-g | | + | + | − | 1 | GAS (IRF1 > Lys6 > IFP) |
| Il-10 | + | ? | ? | − | 1, 3 | |
| gp130 family | | | | | | |
| IL-6 (Pleiotropic) | + | + | + | ? | 1, 3 | GAS (IRF1 > Lys6 > IFP) |
| Il-11 (Pleiotropic) | ? | + | ? | ? | 1, 3 | |
| OnM (Pleiotropic) | ? | + | + | ? | 1, 3 | |
| LIF (Pleiotropic) | ? | + | + | ? | 1, 3 | |
| CNTF (Pleiotropic) | −/+ | + | + | ? | 1, 3 | |
| G-CSF (Pleiotropic) | ? | + | ? | ? | 1, 3 | |
| IL-12 (Pleiotropic) | + | − | + | + | 1, 3 | |
| g-C family | | | | | | |
| IL-2 (lymphocytes) | − | + | − | + | 1, 3, 5 | GAS |
| IL-4 (lymph/myeloid) | − | + | − | + | 6 | GAS (IRF1 = IFP >> Ly6)(IgH) |
| IL-7 (lymphocytes) | − | + | − | + | 5 | GAS |
| IL-9 (lymphocytes) | − | + | − | + | 5 | GAS |
| IL-13 (lymphocyte) | − | + | ? | ? | 6 | GAS |
| IL-15 | ? | + | ? | + | 5 | GAS |
| gp140 family | | | | | | |
| IL-3 (myeloid) | − | − | + | − | 5 | GAS (IRF1 > IFP >> Ly6) |
| IL-5 (myeloid) | − | − | + | − | 5 | GAS |
| GM-CSF (myeloid) | − | − | + | − | 5 | GAS |
| Growth hormone family | | | | | | |
| GH | ? | − | + | − | 5 | |
| PRL | ? | +/− | + | − | 1, 3, 5 | |
| EPO | ? | − | + | − | 5 | GAS (B-CAS > IRF1 = IFP >> Ly6) |
| Receptor Tyrosine Kinases | | | | | | |
| EGF | ? | + | + | − | 1, 3 | GAS (IRF1) |
| PDGF | ? | + | + | − | 1, 3 | |
| CSF-1 | ? | + | + | − | 1, 3 | GAS (not IRF1) |

[1360] To construct a synthetic GAS containing promoter element, which is used in the Biological Assays described in Examples 32-33, a PCR based strategy is employed to generate a GAS-SV40 promoter sequence. The 5′ primer contains four tandem copies of the GAS binding site found in the IRF1 promoter and previously demonstrated to bind STATs upon induction with a range of cytokines (Rothman et al., Immunity 1:457-468 (1994).), although other GAS or ISRE elements can be used instead. The 5′ primer also contains 18 bp of sequence complementary to the SV40 early promoter sequence and is flanked with an XhoI site. The sequence of the 5′ primer is:

| | |
|---|---|
| 5′:GCGCCTCGAGATTTCCCCGAAATCTAGATTTCCCCGAAATGATTTCCCCGAA | (SEQ ID NO: 3) |
| ATGATTTCCCCGAAATATCTGCCATCTCAATTAG:3′ | |

[1361] The downstream primer is complementary to the SV40 promoter and is flanked with a Hind Im site: 5′:GCGGCAAGCTTTTTGCAAAGCCTAGGC:3′ (SEQ ID NO: 4)

[1362] PCR amplification is performed using the SV40 promoter template present in the B-gal:promoter plasmid obtained from Clontech. The resulting PCR fragment is digested with Xhol/Hind III and subcloned into BLSK2-. (Stratagene.) Sequencing with forward and reverse primers confirms that the insert contains the following sequence:

| | |
|---|---|
| 5′:CTCGAGATTTCCCCGAAATCTAGATTTCCCCGAAATGATTTCCCCGAAATGA | (SEQ ID NO: 5) |
| TTTCCCCGAAATATCTGCCATCTCAATTAGTCAGCAACCATAGTCCCGCCCCTA | |
| ACTCCGCCCATCCCGCCCCTAACTCCGCCCAGTTCCGCCCATTCTCCGCCCCAT | |
| GGCTGACTAATTTTTTTTATTTATGCAGAGGCCGAGGCCGCCTCGGCCTCTGAG | |
| CTATTCCAGAAGTAGTGAGGAGGCTTTTTTGGAGGCCTAGGCTTTTGCAAAAA | |
| GCTT:3′ | |

[1363] With this GAS promoter element linked to the SV40 promoter, a GAS:SEAP2 reporter construct is next engineered. Here, the reporter molecule is a secreted alkaline phosphatase, or “SEAP.” Clearly, however, any reporter molecule can be instead of SEAP, in this or in any of the other Examples. Well known reporter molecules that can be used instead of SEAP include chloramphenicol acetyltransferase (CAT), luciferase, alkaline phosphatase, B-galactosidase, green fluorescent protein (GFP), or any protein detectable by an antibody.

[1364] The above sequence confirmed synthetic GAS-SV40 promoter element is subcloned into the pSEAP-Promoter vector obtained from Clontech using HindIII and XhoI, effectively replacing the SV40 promoter with the amplified GAS:SV40 promoter element, to create the GAS-SEAP vector. However, this vector does not contain a neomycin resistance gene, and therefore, is not preferred for mammalian expression systems.

[1365] Thus, in order to generate mammalian stable cell lines expressing the GAS-SEAP reporter, the GAS-SEAP cassette is removed from the GAS-SEAP vector using SalI and NotI, and inserted into a backbone vector containing the neomycin resistance gene, such as pGFP-1 (Clontech), using these restriction sites in the multiple cloning site, to create the GAS-SEAP/Neo vector. Once this vector is transfected into mammalian cells, this vector can then be used as a reporter molecule for GAS binding as described in Examples 32-33.

[1366] Other constructs can be made using the above description and replacing GAS with a different promoter sequence. For example, construction of reporter molecules containing EGR and NF-KB promoter sequences are described in Examples 34 and 35. However, many other promoters can be substituted using the protocols described in these Examples. For instance, SRE, IL-2, NFAT, or Osteocalcin promoters can be substituted, alone or in combination (e.g., GAS/NF-KB/EGR, GAS/NF-KB, I1-2/NFAT, or NF-KB/GAS). Similarly, other cell lines can be used to test reporter construct activity, such as HELA (epithelial), HUVEC (endothelial), Reh (B-cell), Saos-2 (osteoblast), HUVAC (aortic), or Cardiomyocyte.

### Example 32

### High-Throughput Screening Assay for T-Cell Activity.

[1367] The following protocol is used to assess T-cell activity by identifying factors, and determining whether supernate containing a polypeptide of the invention proliferates and/or differentiates T-cells. T-cell activity is assessed using the GAS/SEAP/Neo construct produced in Example 31. Thus, factors that increase SEAP activity indicate the ability to activate the Jaks-STATS signal transduction pathway. The T-cell used in this assay is Jurkat T-cells (ATCC Accession No. TIB-152), although Molt-3 cells (ATCC Accession No. CRL-1552) and Molt-4 cells (ATCC Accession No. CRL-1582) cells can also be used.

[1368] Jurkat T-cells are lymphoblastic CD4+ Th1 helper cells. In order to generate stable cell lines, approximately 2 million Jurkat cells are transfected with the GAS-SEAP/neo vector using DMRIE-C (Life Technologies)(transfection procedure described below). The transfected cells are seeded to a density of approximately 20,000 cells per well and transfectants resistant to 1 mg/ml genticin selected. Resistant colonies are expanded and then tested for their response to increasing concentrations of interferon gamma. The dose response of a selected clone is demonstrated.

[1369] Specifically, the following protocol will yield sufficient cells for 75 wells containing 200 ul of cells. Thus, it is either scaled up, or performed in multiple to generate sufficient cells for multiple 96 well plates. Jurkat cells are maintained in RPMI+10% serum with 1% Pen-Strep. Combine 2.5 mls of OPTI-MEM (Life Technologies) with 10 ug of plasmid DNA in a T25 flask. Add 2.5 ml OPTI-MEM containing 50 ul of DMRIE-C and incubate at room temperature for 15-45 mins.

[1370] During the incubation period, count cell concentration, spin down the required number of cells (10⁷ per transfection), and resuspend in OPTI-MEM to a final concentration of 10⁷ cells/ml. Then add 1 ml of 1×10⁷ cells in OPTI-MEM to T25 flask and incubate at 37 degree C. for 6 hrs. After the incubation, add 10 ml of RPMI+15% serum.

[1371] The Jurkat:GAS-SEAP stable reporter lines are maintained in RPMI+10% serum, 1 mg/ml Genticin, and 1% Pen-Strep. These cells are treated with supernatants containing polypeptide of the present invention or polypeptide of the present invention induced polypeptides as produced by the protocol described in Example 30.

[1372] On the day of treatment with the supernatant, the cells should be washed and resuspended in fresh RPMI+10% serum to a density of 500,000 cells per ml. The exact number of cells required will depend on the number of supernatants being screened. For one 96 well plate, approximately 10 million cells (for 10 plates, 100 million cells) are required.

[1373] Transfer the cells to a triangular reservoir boat, in order to dispense the cells into a 96 well dish, using a 12 channel pipette. Using a 12 channel pipette, transfer 200 ul of cells into each well (therefore adding 100, 000 cells per well).

[1374] After all the plates have been seeded, 50 ul of the supernatants are transferred directly from the 96 well plate containing the supernatants into each well using a 12 channel pipette. In addition, a dose of exogenous interferon gamma (0.1, 1.0, 10 ng) is added to wells H9, H10, and H 11 to serve as additional positive controls for the assay.

[1375] The 96 well dishes containing Jurkat cells treated with supernatants are placed in an incubator for 48 hrs (note: this time is variable between 48-72 hrs). 35 ul samples from each well are then transferred to an opaque 96 well plate using a 12 channel pipette. The opaque plates should be covered (using sellophene covers) and stored at −20 degree C. until SEAP assays are performed according to Example 36. The plates containing the remaining treated cells are placed at 4 degree C. and serve as a source of material for repeating the assay on a specific well if desired.

[1376] As a positive control, 100 Unit/ml interferon gamma can be used which is known to activate Jurkat T cells. Over 30 fold induction is typically observed in the positive control wells.

[1377] The above protocol may be used in the generation of both transient, as well as, stable transfected cells, which would be apparent to those of skill in the art.

### Example 33

### High-Throughput Screening Assay Identifying Myeloid Activity

[1378] The following protocol is used to assess myeloid activity of polypeptide of the present invention by determining whether polypeptide of the present invention proliferates and/or differentiates myeloid cells. Myeloid cell activity is assessed using the GAS/SEAP/Neo construct produced in Example 31. Thus, factors that increase SEAP activity indicate the ability to activate the Jaks-STATS signal transduction pathway. The myeloid cell used in this assay is U937, a pre-monocyte cell line, although TF-1, HL60, or KG1 can be used.

[1379] To transiently transfect U937 cells with the GAS/SEAP/Neo construct produced in Example 31, a DEAE-Dextran method (Kharbanda et al., 1994, Cell Growth & Differentiation, 5:259-265) is used. First, harvest 2×10⁷ U937 cells and wash with PBS. The U937 cells are usually grown in RPMI 1640 medium containing 10% heat-inactivated fetal bovine serum (FBS) supplemented with 100 units/ml penicillin and 100 mg/ml streptomycin.

[1380] Next, suspend the cells in 1 ml of 20 mM Tris-HCl (pH 7.4) buffer containing 0.5 mg/ml DEAE-Dextran, 8 ug GAS-SEAP2 plasmid DNA, 140 mM NaCl, 5 mM KCl, 375 uM Na₂HPO₄.7H₂O, 1 mM MgCl₂, and 675 uM CaCl₂. Incubate at 37 degrees C. for 45 min.

[1381] Wash the cells with RPMI 1640 medium containing 10% FBS and then resuspend in 10 ml complete medium and incubate at 37 degree C. for 36 hr.

[1382] The GAS-SEAP/U937 stable cells are obtained by growing the cells in 400 ug/ml G418. The G418-free medium is used for routine growth but every one to two months, the cells should be re-grown in 400 ug/ml G418 for couple of passages.

[1383] These cells are tested by harvesting 1×10⁸ cells (this is enough for ten 96-well plates assay) and wash with PBS. Suspend the cells in 200 ml above described growth medium, with a final density of 5×10⁵ cells/ml. Plate 200 ul cells per well in the 96-well plate (or 1×10⁵ cells/well).

[1384] Add 50 ul of the supernatant prepared by the protocol described in Example 30. Incubate at 37 degee C. for 48 to 72 hr. As a positive control, 100 Unit/ml interferon gamma can be used which is known to activate U937 cells. Over 30 fold induction is typically observed in the positive control wells. SEAP assay the supernatant according to the protocol described in Example 36.

### Example 34

### High-Throughput Screening Assay Identifying Neuronal Activity

[1385] When cells undergo differentiation and proliferation, a group of genes are activated through many different signal transduction pathways. One of these genes, EGR1 (early growth response gene 1), is induced in various tissues and cell types upon activation. The promoter of EGR1 is responsible for such induction. Using the EGR1 promoter linked to reporter molecules, activation of cells can be assessed by polypeptide of the present invention.

[1386] Particularly, the following protocol is used to assess neuronal activity in PC12 cell lines. PC12 cells (rat phenochromocytoma cells) are known to proliferate and/or differentiate by activation with a number of mitogens, such as TPA (tetradecanoyl phorbol acetate), NGF (nerve growth factor), and EGF (epidermal growth factor). The EGR1 gene expression is activated during this treatment. Thus, by stably transfecting PC12 cells with a construct containing an EGR promoter linked to SEAP reporter, activation of PC12 cells by polypeptide of the present invention can be assessed.

[1387] The EGR/SEAP reporter construct can be assembled by the following protocol. The EGR-1 promoter sequence (−633 to +1)(Sakamoto K et al., Oncogene 6:867-871 (1991)) can be PCR amplified from human genomic DNA using the following primers:

(SEQ ID NO: 6)

5′ GCGCTCGAGGGATGACAGCGATAGAACCCCGG-3′

(SEQ ID NO: 7)

5′ GCGAAGCTTCGCGACTCCCCGGATCCGCCTC-3′

[1388] Using the GAS:SEAP/Neo vector produced in Example 31, EGR1 amplified product can then be inserted into this vector. Linearize the GAS:SEAP/Neo vector using restriction enzymes XhoI/HindIII, removing the GAS/SV40 stuffer. Restrict the EGR1 amplified product with these same enzymes. Ligate the vector and the EGR1 promoter.

[1389] To prepare 96 well-plates for cell culture, two mls of a coating solution (1:30 dilution of collagen type I (Upstate Biotech Inc. Cat#08-115) in 30% ethanol (filter sterilized)) is added per one 10 cm plate or 50 ml per well of the 96-well plate, and allowed to air dry for 2 hr.

[1390] PC12 cells are routinely grown in RPMI-1640 medium (Bio Whittaker) containing 10% horse serum (JRH BIOSCIENCES, Cat. #12449-78P), 5% heat-inactivated fetal bovine serum (FBS) supplemented with 100 units/ml penicillin and 100 ug/ml streptomycin on a precoated 10 cm tissue culture dish. One to four split is done every three to four days. Cells are removed from the plates by scraping and resuspended with pipetting up and down for more than 15 times.

[1391] Transfect the EGR/SEAP/Neo construct into PC12 using the Lipofectamine protocol described in Example 30. EGR-SEAP/PC12 stable cells are obtained by growing the cells in 300 ug/ml G418. The G418-free medium is used for routine growth but every one to two months, the cells should be re-grown in 300 ug/ml G418 for couple of passages.

[1392] To assay for neuronal activity, a 10 cm plate with cells around 70 to 80% confluent is screened by removing the old medium. Wash the cells once with PBS (Phosphate buffered saline). Then starve the cells in low serum medium (RPMI-1640 containing 1% horse serum and 0.5% FBS with antibiotics) overnight.

[1393] The next morning, remove the medium and wash the cells with PBS. Scrape off the cells from the plate, suspend the cells well in 2 ml low serum medium. Count the cell number and add more low serum medium to reach final cell density as 5×10⁵ cells/ml.

[1394] Add 200 ul of the cell suspension to each well of 96-well plate (equivalent to 1×10⁵ cells/well). Add 50 ul supernatant produced by Example 30, 37 degree C. for 48 to 72 hr. As a positive control, a growth factor known to activate PC12 cells through EGR can be used, such as 50 ng/ul of Neuronal Growth Factor (NGF). Over fifty-fold induction of SEAP is typically seen in the positive control wells. SEAP assay the supernatant according to Example 36.

### Example 35

### High-Throughput Screening Assay for T-Cell Activity

[1395] NF-KB (Nuclear Factor KB) is a transcription factor activated by a wide variety of agents including the inflammatory cytokines IL-1 and TNF, CD30 and CD40, lymphotoxin-alpha and lymphotoxin-beta, by exposure to LPS or thrombin, and by expression of certain viral gene products. As a transcription factor, NF-KB regulates the expression of genes involved in immune cell activation, control of apoptosis (NF-KB appears to shield cells from apoptosis), B and T-cell development, anti-viral and antimicrobial responses, and multiple stress responses.

[1396] In non-stimulated conditions, NF-KB is retained in the cytoplasm with I-KB (Inhibitor KB). However, upon stimulation, I-KB is phosphorylated and degraded, causing NF-KB to shuttle to the nucleus, thereby activating transcription of target genes. Target genes activated by NF-KB include IL-2, IL-6, GM-CSF, ICAM-1 and class 1 MHC.

[1397] Due to its central role and ability to respond to a range of stimuli, reporter constructs utilizing the NF-KB promoter element are used to screen the supernatants produced in Example 30. Activators or inhibitors of NF-KB would be useful in treating, preventing, and/or diagnosing diseases. For example, inhibitors of NF-KB could be used to treat those diseases related to the acute or chronic activation of NF-KB, such as rheumatoid arthritis.

[1398] To construct a vector containing the NF-KB promoter element, a PCR based strategy is employed. The upstream primer contains four tandem copies of the NF-KB binding site (GGGGACTTTCCC) (SEQ ID NO: 8), 18 bp of sequence complementary to the 5′ end of the SV40 early promoter sequence, and is flanked with an XhoI site:

| | |
|---|---|
| 5′:GCGGCCTCGAGGGGACTTTCCCGGGGACTTTCCGGGGACTTTCCGGGACTTT | (SEQ ID NO: 9) |
| CCATCCTGCCATCTCAATTAG:3′ | |

[1399] The downstream primer is complementary to the 3′ end of the SV40 promoter and is flanked with a Hind III site:

| | |
|---|---|
| 5′:GCGGCAAGCTTTTTGCAAAGCCTAGGC:3′ | (SEQ ID NO: 4) |

[1400] PCR amplification is performed using the SV40 promoter template present in the pB-gal:promoter plasmid obtained from Clontech. The resulting PCR fragment is digested with XhoI and Hind III and subcloned into BLSK2-. (Stratagene) Sequencing with the T7 and T3 primers confirms the insert contains the following sequence:

| | |
|---|---|
| 5′:CTCGAGGGGACTTTCCCGGGGACTTTCCGGGGACTTTCCGGGACTTTCCATC | (SEQ ID NO: 10) |
| TGCCATCTCAATTAGTCAGCAACCATAGTCCCGCCCCTAACTCCGCCCATCCC | |
| GCCCCTAACTCCGCCCAGTTCCGCCCATTCTCCGCCCCATGGCTGACTAATTTT | |
| TTTTATTTATGCAGAGGCCGAGGCCGCCTCGGCCTCTGAGCTATTCCAGAAGT | |
| AGTGAGGAGGCTTTTTTGGAGGCCTAGGCTTTTGCAAAAAGCTT:3′ | |

[1401] Next, replace the SV40 minimal promoter element present in the pSEAP2-promoter plasmid (Clontech) with this NF-KB/SV40 fragment using XhoI and HindIII. However, this vector does not contain a neomycin resistance gene, and therefore, is not preferred for mammalian expression systems.

[1402] In order to generate stable mammalian cell lines, the NF-KB/SV40/SEAP cassette is removed from the above NF-KB/SEAP vector using restriction enzymes SalI and NotI, and inserted into a vector containing neomycin resistance. Particularly, the NF-KB/SV40/SEAP cassette was inserted into pGFP-1 (Clontech), replacing the GFP gene, after restricting pGFP-1 with SalI and NotI.

[1403] Once NF-KB/SV40/SEAP/Neo vector is created, stable Jurkat T-cells are created and maintained according to the protocol described in Example 32. Similarly, the method for assaying supernatants with these stable Jurkat T-cells is also described in Example 32. As a positive control, exogenous TNF alpha (0.1,1, 10 ng) is added to wells H9, H10, and Hi 1, with a 5-10 fold activation typically observed.

### Example 36

### Assay for SEAP Activity

[1404] As a reporter molecule for the assays described in Examples 32-35, SEAP activity is assayed using the Tropix Phospho-light Kit (Cat. BP-400) according to the following general procedure. The Tropix Phospho-light Kit supplies the Dilution, Assay, and Reaction Buffers used below.

[1405] Prime a dispenser with the 2.5× Dilution Buffer and dispense 15 ul of 2.5× dilution buffer into Optiplates containing 35 ul of a supernatant. Seal the plates with a plastic sealer and incubate at 65 degree C. for 30 min. Separate the Optiplates to avoid uneven heating.

[1406] Cool the samples to room temperature for 15 minutes. Empty the dispenser and prime with the Assay Buffer. Add 50 ml Assay Buffer and incubate at room temperature 5 min. Empty the dispenser and prime with the Reaction Buffer (see the Table below). Add 50 ul Reaction Buffer and incubate at room temperature for 20 minutes. Since the intensity of the chemiluminescent signal is time dependent, and it takes about 10 minutes to read 5 on a luminometer, thus one should treat 5 plates at each time and start the second set 10 minutes later.

[1407] Read the relative light unit in the luminometer. Set H12 as blank, and print the results. An increase in chemiluminescence indicates reporter activity.

Reaction Buffer Formulation:

| # of | Rxn buffer | CSPD |
|---|---|---|
| plates | diluent (ml) | (ml) |
| 10 | 60 | 3 |
| 11 | 65 | 3.25 |
| 12 | 70 | 3.5 |
| 13 | 75 | 3.75 |
| 14 | 80 | 4 |
| 15 | 85 | 4.25 |
| 16 | 90 | 4.5 |
| 17 | 95 | 4.75 |
| 18 | 100 | 5 |
| 19 | 105 | 5.25 |
| 20 | 110 | 5.5 |
| 21 | 115 | 5.75 |
| 22 | 120 | 6 |
| 23 | 125 | 6.25 |
| 24 | 130 | 6.5 |
| 25 | 135 | 6.75 |
| 26 | 140 | 7 |
| 27 | 145 | 7.25 |
| 28 | 150 | 7.5 |
| 29 | 155 | 7.75 |
| 30 | 160 | 8 |
| 31 | 165 | 8.25 |
| 32 | 170 | 8.5 |
| 33 | 175 | 8.75 |
| 34 | 180 | 9 |
| 35 | 185 | 9.25 |
| 36 | 190 | 9.5 |
| 37 | 195 | 9.75 |
| 38 | 200 | 10 |
| 39 | 205 | 10.25 |
| 40 | 210 | 10.5 |
| 41 | 215 | 10.75 |
| 42 | 220 | 11 |
| 43 | 225 | 11.25 |
| 44 | 230 | 11.5 |
| 45 | 235 | 11.75 |
| 46 | 240 | 12 |
| 47 | 245 | 12.25 |
| 48 | 250 | 12.5 |
| 49 | 255 | 12.75 |
| 50 | 260 | 13 |

### Example 37

### High-Throughput Screening Assay Identifying Changes in Small Molecule Concentration and Membrane Permeability

[1408] Bindinf of a ligand to a receptor is known to alter intracellular levels of small molecules, such as calcium, potassium, sodium, and pH, as well as alter membrane potential. These alterations can be measured in an assay to identify supernatants which bind to receptors of a particular cell. Although the following protocol describes an assay for calcium, this protocol can easily be modified to detect changes in potassium, sodium, ph, membrane potential, or any other small molecule which is detectable by a fluorescent probe.

[1409] The following assay uses Fluorometric Imaging Plate Reader (“FLIPR”) to measure changes in fluorescent molecules (Molecular Probes) that bind small molecules. Clearly, any fluorescent molecule detecting a small molecule can be used instead of the calcium fluorescent molecule, fluo-4 (Molecular Probes, Inc.; catalog no. F-14202), used here.

[1410] For adherent cells, seed the cells at 10,000-20,000 cells/well in a Co-star black 96-well plate with clear bottom. The plate is incubated in a CO₂ incubator for 20 hours. The adherent cells are washed two times in Biotek washer with 200 ul of HBSS (Hank's Balanced Salt Solution) leaving 100 ul of buffer after the final wash.

[1411] A stock solution of 1 mg/ml fluo-4 is made in 10% pluronic acid DMSO. To load the cells with fluo-4, 50 ul of 12 ug/ml fluo-4 is added to each well. The plate is incubated at 37 degrees C. in a CO₂ incubator for 60 min. The plate is washed four times in the Biotek washer with HBSS leaving 100 ul of buffer.

[1412] For non-adherent cells, the cells are spun down from culture media. Cells are re-suspended to 2-5×10⁶ cells/ml with HBSS in a 50-ml conical tube. 4 ul of 1 mg/ml fluo-4 solution in 10% pluronic acid DMSO is added to each ml of cell suspension. The tube is then placed in a 37 degrees C. water bath for 30-60 min. The cells are washed twice with HBSS, resuspended to 1×10⁶ cells/ml, and dispensed into a microplate, 100 ul/well. The plate is centrifuged at 1000 rpm for 5 min. The plate is then washed once in Denley Cell Wash with 200 ul, followed by an aspiration step to 100 ul final volume.

[1413] For a non-cell based assay, each well contains a fluorescent molecule, such as fluo-4. The supernatant is added to the well, and a change in fluorescence is detected.

[1414] To measure the fluorescence of intracellular calcium, the FLIPR is set for the following parameters: (1) System gain is 300-800 mW; (2) Exposure time is 0.4 second; (3) Camera F/stop is F/2; (4) Excitation is 488 nm; (5) Emission is 530 nm; and (6) Sample addition is 50 ul. Increased emission at 530 nm indicates an extracellular signaling event caused by the a molecule, either polypeptide of the present invention or a molecule induced by polypeptide of the present invention, which has resulted in an increase in the intracellular Ca⁺⁺ concentration.

### Example 38

### High-Throughput Screening Assay Identifying Tyrosine Kinase Activity

[1415] The Protein Tyrosine Kinases (PTK) represent a diverse group of transmembrane and cytoplasmic kinases. Within the Receptor Protein Tyrosine Kinase RPTK) group are receptors for a range of mitogenic and metabolic growth factors including the PDGF, FGF, EGF, NGF, HGF and Insulin receptor subfamilies. In addition there are a large family of RPTKs for which the corresponding ligand is unknown. Ligands for RPTKs include mainly secreted small proteins, but also membrane-bound and extracellular matrix proteins.

[1416] Activation of RPTK by ligands involves ligand-mediated receptor dimerization, resulting in transphosphorylation of the receptor subunits and activation of the cytoplasmic tyrosine kinases. The cytoplasmic tyrosine kinases include receptor associated tyrosine kinases of the src-family (e.g., src, yes, lck, lyn, fyn) and non-receptor linked and cytosolic protein tyrosine kinases, such as the Jak family, members of which mediate signal transduction triggered by the cytokine superfamily of receptors (e.g., the Interleukins, Interferons, GM-CSF, and Leptin).

[1417] Because of the wide range of known factors capable of stimulating tyrosine kinase activity, identifying whether polypeptide of the present invention or a molecule induced by polypeptide of the present invention is capable of activating tyrosine kinase signal transduction pathways is of interest. Therefore, the following protocol is designed to identify such molecules capable of activating the tyrosine kinase signal transduction pathways.

[1418] Seed target cells (e.g., primary keratinocytes) at a density of approximately 25,000 cells per well in a 96 well Loprodyne Silent Screen Plates purchased from Nalge Nunc (Naperville, Ill.). The plates are sterilized with two 30 minute rinses with 100% ethanol, rinsed with water and dried overnight. Some plates are coated for 2 hr with 100 ml of cell culture grade type I collagen (50 mg/ml), gelatin (2%) or polylysine (50 mg/ml), all of which can be purchased from Sigma Chemicals (St. Louis, Mo.) or 10% Matrigel purchased from Becton Dickinson (Bedford,Mass.), or calf serum, rinsed with PBS and stored at 4 degree C. Cell growth on these plates is assayed by seeding 5,000 cells/well in growth medium and indirect quantitation of cell number through use of alamarBlue as described by the manufacturer Alamar Biosciences, Inc. (Sacramento, Calif.) after 48 hr. Falcon plate covers #3071 from Becton Dickinson (Bedford,Mass.) are used to cover the Loprodyne Silent Screen Plates. Falcon Microtest ImI cell culture plates can also be used in some proliferation experiments.

[1419] To prepare extracts, A431 cells are seeded onto the nylon membranes of Loprodyne plates (20,000/200 ml/well) and cultured overnight in complete medium. Cells are quiesced by incubation in serum-free basal medium for 24 hr. After 5-20 minutes treatment with EGF (60 ng/ml) or 50 ul of the supernatant produced in Example 30, the medium was removed and 100 ml of extraction buffer ((20 mM HEPES pH 7.5, 0.15 M NaCl, 1% Triton X-100, 0.1% SDS, 2 mM Na3VO4, 2 mM Na4P207 and a cocktail of protease inhibitors (#1836170) obtained from Boeheringer Mannheim (Indianapolis, Ind.)) is added to each well and the plate is shaken on a rotating shaker for 5 minutes at 40° C. The plate is then placed in a vacuum transfer manifold and the extract filtered through the 0.45 mm membrane bottoms of each well using house vacuum. Extracts are collected in a 96-well catch/assay plate in the bottom of the vacuum manifold and immediately placed on ice. To obtain extracts clarified by centrifugation, the content of each well, after detergent solubilization for 5 minutes, is removed and centrifuged for 15 minutes at 4 degree C. at 16,000×g.

[1420] Test the filtered extracts for levels of tyrosine kinase activity. Although many methods of detecting tyrosine kinase activity are known, one method is described here.

[1421] Generally, the tyrosine kinase activity of a supernatant is evaluated by determining its ability to phosphorylate a tyrosine residue on a specific substrate (a biotinylated peptide). Biotinylated peptides that can be used for this purpose include PSK1 (corresponding to amino acids 6-20 of the cell division kinase cdc2-p34) and PSK2 (corresponding to amino acids 1-17 of gastrin). Both peptides are substrates for a range of tyrosine kinases and are available from Boehringer Mannheim.

[1422] The tyrosine kinase reaction is set up by adding the following components in order. First, add 10 ul of 5 uM Biotinylated Peptide, then 10 ul ATP/Mg₂+ (5 mM ATP/50 mM MgCl₂), then 10 ul of 5× Assay Buffer (40 mM imidazole hydrochloride, pH7.3, 40 mM beta-glycerophosphate, 1 mM EGTA, 100 mM MgCl₂, 5 mM MnCl₂, 0.5 mg/ml BSA), then 5 ul of Sodium Vanadate(1 mM), and then 5 ul of water. Mix the components gently and preincubate the reaction mix at 30 degree C. for 2 min. Initial the reaction by adding 10 ul of the control enzyme or the filtered supernatant.

[1423] The tyrosine kinase assay reaction is then terminated by adding 10 ul of 120 mm EDTA and place the reactions on ice.

[1424] Tyrosine kinase activity is determined by transferring 50 ul aliquot of reaction mixture to a microtiter plate (MTP) module and incubating at 37 degree C. for 20 min. This allows the streptavidin coated 96 well plate to associate with the biotinylated peptide. Wash the MTP module with 300 ul/well of PBS four times. Next add 75 ul of anti-phospotyrosine antibody conjugated to horse radish peroxidase(anti-P-Tyr-POD(0.5 u/ml)) to each well and incubate at 37 degree C. for one hour. Wash the well as above.

[1425] Next add 100 ul of peroxidase substrate solution (Boehringer Mannheim) and incubate at room temperature for at least 5 mins (up to 30 min). Measure the absorbance of the sample at 405 nm by using ELISA reader. The level of bound peroxidase activity is quantitated using an ELISA reader and reflects the level of tyrosine kinase activity.

### Example 39

### High-Throughput Screening Assay Identifying Phosphorylation Activity

[1426] As a potential alternative and/or complement to the assay of protein tyrosine kinase activity described in Example 38, an assay which detects activation (phosphorylation) of major intracellular signal transduction intermediates can also be used. For example, as described below one particular assay can detect tyrosine phosphorylation of the Erk-1 and Erk-2 kinases. However, phosphorylation of other molecules, such as Raf, JNK, p38 MAP, Map kinase kinase (MEK), MEK kinase, Src, Muscle specific kinase (MuSK), IRAK, Tec, and Janus, as well as any other phosphoserine, phosphotyrosine, or phosphothreonine molecule, can be detected by substituting these molecules for Erk-1 or Erk-2 in the following assay.

[1427] Specifically, assay plates are made by coating the wells of a 96-well ELISA plate with 0.1 ml of protein G (1 ug/ml) for 2 hr at room temp, (RT). The plates are then rinsed with PBS and blocked with 3% BSA/PBS for 1 hr at RT. The protein G plates are then treated with 2 commercial monoclonal antibodies (10 ng/well) against Erk-1 and Erk-2 (1 hr at RT) (Santa Cruz Biotechnology). (To detect other molecules, this step can easily be modified by substituting a monoclonal antibody detecting any of the above described molecules.) After 3-5 rinses with PBS, the plates are stored at 4 degree C. until use.

[1428] A431 cells are seeded at 20,000/well in a 96-well Loprodyne filterplate and cultured overnight in growth medium. The cells are then starved for 48 hr in basal medium (DMEM) and then treated with EGF (6 ng/well) or 50 ul of the supernatants obtained in Example 30 for 5-20 minutes. The cells are then solubilized and extracts filtered directly into the assay plate.

[1429] After incubation with the extract for 1 hr at RT, the wells are again rinsed. As a positive control, a commercial preparation of MAP kinase (10 ng/well) is used in place of A431 extract. Plates are then treated with a commercial polyclonal (rabbit) antibody (1 ug/ml) which specifically recognizes the phosphorylated epitope of the Erk-1 and Erk-2 kinases (1 hr at RT). This antibody is biotinylated by standard procedures. The bound polyclonal antibody is then quantitated by successive incubations with Europium-streptavidin and Europium fluorescence enhancing reagent in the Wallac DELFIA instrument (time-resolved fluorescence). An increased fluorescent signal over background indicates a phosphorylation by polypeptide of the present invention or a molecule induced by polypeptide of the present invention.

### Example 40

### Assay for the Stimulation of Bone Marrow CD34+ Cell Proliferation

[1430] This assay is based on the ability of human CD34+ to proliferate in the presence of hematopoietic growth factors and evaluates the ability of isolated polypeptides expressed in mammalian cells to stimulate proliferation of CD34+ cells.

[1431] It has been previously shown that most mature precursors will respond to only a single signal. More immature precursors require at least two signals to respond. Therefore, to test the effect of polypeptides on hematopoietic activity of a wide range of progenitor cells, the assay contains a given polypeptide in the presence or absence of other hematopoietic growth factors. Isolated cells are cultured for 5 days in the presence of Stem Cell Factor (SCF) in combination with tested sample. SCF alone has a very limited effect on the proliferation of bone marrow (BM) cells, acting in such conditions only as a “survival” factor. However, combined with any factor exhibiting stimulatory effect on these cells (e.g., IL-3), SCF will cause a synergistic effect. Therefore, if the tested polypeptide has a stimulatory effect on hematopoietic progenitors, such activity can be easily detected. Since normal BM cells have a low level of cycling cells, it is likely that any inhibitory effect of a given polypeptide, or agonists or antagonists thereof, might not be detected. Accordingly, assays for an inhibitory effect on progenitors is preferably tested in cells that are first subjected to in vitro stimulation with SCF+IL+3, and then contacted with the compound that is being evaluated for inhibition of such induced proliferation.

[1432] Briefly, CD34+ cells are isolated using methods known in the art. The cells are thawed and resuspended in medium (QBSF 60 serum-free medium with 1% L-glutamine (500 ml) Quality Biological, Inc., Gaithersburg, Md. Cat#160-204-101). After several gentle centrifugation steps at 200×g, cells are allowed to rest for one hour. The cell count is adjusted to 2.5×10⁵ cells/ml. During this time, 100 μl of sterile water is added to the peripheral wells of a 96-well plate. The cytokines that can be tested with a given polypeptide in this assay is rhSCF (R&D Systems, Minneapolis, Minn., Cat#255-SC) at 50 ng/ml alone and in combination with rhSCF and rhIL-3 (R&D Systems, Minneapolis, Minn., Cat#203-ML) at 30 ng/ml. After one hour, 10 μl of prepared cytokines, 50 μl of the supernatants prepared in Example 30 (supernatants at 1:2 dilution =32 μl) and 20 μl of diluted cells are added to the media which is already present in the wells to allow for a final total volume of 100 μl. The plates are then placed in a 37° C./5% CO₂ incubator for five days.

[1433] Eighteen hours before the assay is harvested, 0.5 μCi/well of [3H] Thymidine is added in a 10 μl volume to each well to determine the proliferation rate. The experiment is terminated by harvesting the cells from each 96-well plate to a filtermat using the Tomtec Harvester 96. After harvesting, the filtermats are dried, trimmed and placed into OmniFilter assemblies consisting of one OmniFilter plate and one OmniFilter Tray. 60 μl Microscint is added to each well and the plate sealed with TopSeal-A press-on sealing film A bar code 15 sticker is affixed to the first plate for counting. The sealed plates are then loaded and the level of radioactivity determined via the Packard Top Count and the printed data collected for analysis. The level of radioactivity reflects the amount of cell proliferation.

[1434] The studies described in this example test the activity of a given polypeptide to stimulate bone marrow CD34+ cell proliferation. One skilled in the art could easily modify the exemplified studies to test the activity of polynucleotides (e.g., gene therapy), antibodies, agonists, and/or antagonists and fragments and variants thereof. As a nonlimiting example, potential antagonists tested in this assay would be expected to inhibit cell proliferation in the presence of cytokines and/or to increase the inhibition of cell proliferation in the presence of cytokines and a given polypeptide. In contrast, potential agonists tested in this assay would be expected to enhance cell proliferation and/or to decrease the inhibition of cell proliferation in the presence of cytokines and a given polypeptide.

[1435] The ability of a gene to stimulate the proliferation of bone marrow CD34+ cells indicates that polynucleotides and polypeptides corresponding to the gene are useful for the diagnosis and treatment of disorders affecting the immune system and hematopoiesis. Representative uses are described in the “Immune Activity” and “Infectious Disease” sections above, and elsewhere herein.

### Example 41

### Assay for Extracellular Matrix Enhanced Cell Response (EMECR)

[1436] The objective of the Extracellular Matrix Enhanced Cell Response (EMECR) assay is to identify gene products (e.g., isolated polypeptides) that act on the hematopoietic stem cells in the context of the extracellular matrix (ECM) induced signal.

[1437] Cells respond to the regulatory factors in the context of signal(s) received from the surrounding microenvironment. For example, fibroblasts, and endothelial and epithelial stem cells fail to replicate in the absence of signals from the ECM. Hematopoietic stem cells can undergo self-renewal in the bone marrow, but not in in vitro suspension culture. The ability of stem cells to undergo self-renewal in vitro is dependent upon their interaction with the stromal cells and the ECM protein fibronectin (fn). Adhesion of cells to fn is mediated by the α₅.β₁ and α4.β₁ integrin receptors, which are expressed by human and mouse hematopoietic stem cells. The factor(s) which integrate with the ECM environment and are responsible for stimulating stem cell self-renewal havea not yet been identified. Discovery of such factors should be of great interest in gene therapy and bone marrow transplant applications

[1438] Briefly, polystyrene, non tissue culture treated, 96-well plates are coated with fn fragment at a coating concentration of 0.2 82 g/ cm². Mouse bone marrow cells are plated (1,000 cells/well ) in 0.2 ml of serum-free medium. Cells cultured in the presence of IL-3 (5 ng/ml)+SCF (50 ng/ml) would serve as the positive control, conditions under which little self-renewal but pronounced differentiation of the stem cells is to be expected. Gene products of the invention (e.g., including, but not limited to, polynucleotides and polypeptides of the present invention, and supernatants produced in Example 30), are tested with appropriate negative controls in the presence and absence of SCF(5.0 ng/ml), where test factor supernatants represent 10% of the total assay volume. The plated cells are then allowed to grow by incubating in a low oxygen environment (5% CO₂, 7% O_{2,} and 88% N₂) tissue culture incubator for 7 days. The number of proliferating cells within the wells is then quantitated by measuring thymidine incorporation into cellular DNA. Verification of the positive hits in the assay will require phenotypic characterization of the cells, which can be accomplished by scaling up of the culture system and using appropriate antibody reagents against cell surface antigens and FACScan.

[1439] One skilled in the art could easily modify the exemplified studies to test the activity of polynucleotides (e.g., gene therapy), antibodies, agonists, and/or antagonists and fragments and variants thereof.

[1440] If a particular polypeptide of the present invention is found to be a stimulator of hematopoietic progenitors, polynucleotides and polypeptides corresponding to the gene encoding said polypeptide may be useful for the diagnosis and treatment of disorders affecting the immune system and hematopoiesis. Representative uses are described in the “Imniune Activity” and “Infectious Disease” sections above, and elsewhere herein. The gene product may also be useful in the expansion of stem cells and committed progenitors of various blood lineages, and in the differentiation and/or proliferation of various cell types.

[1441] Additionally, the polynucleotides and/or polypeptides of the gene of interest and/or agonists and/or antagonists thereof, may also be employed to inhibit the proliferation and differentiation of hematopoietic cells and therefore may be employed to protect bone marrow stem cells from chemotherapeutic agents during chemotherapy. This antiproliferative effect may allow administration of higher doses of chemotherapeutic agents and, therefore, more effective chemotherapeutic treatment.

[1442] Moreover, polynucleotides and polypeptides corresponding to the gene of interest may also be useful for the treatment and diagnosis of hematopoietic related disorders such as, for example, anemia, pancytopenia, leukopenia, thrombocytopenia or leukemia since stromal cells are important in the production of cells of hematopoietic lineages. The uses include bone marrow cell ex-vivo culture, bone marrow transplantation, bone marrow reconstitution, radiotherapy or chemotherapy of neoplasia.

### Example 42

### Human Dermal Fibroblast and Aortic Smooth Muscle Cell Proliferation

[1443] The polypeptide of interest is added to cultures of normal human dermal fibroblasts (NHDF) and human aortic smooth muscle cells (AOSMC) and two co-assays are performed with each sample. The first assay examines the effect of the polypeptide of interest on the proliferation of normal human dermal fibroblasts (NHDF) or aortic smooth muscle cells (AoSMC). Aberrant growth of fibroblasts or smooth muscle cells is a part of several pathological processes, including fibrosis, and restenosis. The second assay examines IL6 production by both NHDF and SMC. IL6 production is an indication of functional activation. Activated cells will have increased production of a number of cytokines and other factors, which can result in a proinflammatory or immunomodulatory outcome. Assays are run with and without co-TNFa stimulation, in order to check for costimulatory or inhibitory activity.

[1444] Briefly, on day 1, 96-well black plates are set up with 1000 cells/well (NHDF) or 2000 cells/well (AoSMC) in 100 μl culture media. NHDF culture media contains: Clonetics FB basal media, 1 mg/ml hFGF, 5 mg/ml insulin, 50 mg/ml gentamycin, 2% FBS, while AoSMC culture media contains Clonetics SM basal media, 0.5 μg/ml hEGF, 5 mg/ml insulin, 1 μg/ml hFGF, 50 mg/ml gentamycin, 50 μg/ml Amphotericin B, 5% FBS. After incubation at 37° C. for at least 4-5 hours culture media is aspirated and replaced with growth arrest media. Growth arrest media for NHDF contains fibroblast basal media, 50 mg/ml gentamycin, 2% FBS, while growth arrest media for AoSMC contains SM basal media, 50 mg/ml gentamycin, 50 μg/ml Amphotericin B, 0.4% FBS. Incubate at 37° C. until day 2.

[1445] On day 2, serial dilutions and templates of the polypeptide of interest are designed such that they always include media controls and known-protein controls. For both stimulation and inhibition experiments, proteins are diluted in growth arrest media. For inhibition experiments, TNFa is added to a final concentration of 2 ng/ml (NHDF) or 5 ng/ml (AoSMC). Add ⅓ vol media containing controls or polypeptides of the present invention and incubate at 37 degrees C./5% CO₂ until day 5.

[1446] Transfer 60 μl from each well to another labeled 96-well plate, cover with a plate-sealer, and store at 4 degrees C. until Day 6 (for IL6 ELISA). To the remaining 100 μl in the cell culture plate, aseptically add Alamar Blue in an amount equal to 10% of the culture volume (10 μl). Return plates to incubator for 3 to 4 hours. Then measure fluorescence with excitation at 530 nm and emission at 590 nm using the CytoFluor. This yields the growth stimulation/inhibition data.

[1447] On day 5, the IL6 ELISA is performed by coating a 96 well plate with 50-100 ul/well of Anti-Human IL6 Monoclonal antibody diluted in PBS, pH 7.4, incubate ON at room temperature.

[1448] On day 6, empty the plates into the sink and blot on paper towels. Prepare Assay Buffer containing PBS with 4% BSA. Block the plates with 200 μl/well of Pierce Super Block blocking buffer in PBS for 1-2 hr and then wash plates with wash buffer (PBS, 0.05% Tween-20). Blot plates on paper towels. Then add 50 μl/well of diluted Anti-Human IL-6 Monoclonal, Biotin-labeled antibody at 0.50 mg/ml. Make dilutions of IL-6 stock in media (30, 10, 3, 1, 0.3, 0 ng/ml). Add duplicate samples to top row of plate. Cover the plates and incubate for 2 hours at RT on shaker.

[1449] Plates are washed with wash buffer and blotted on paper towels. Dilute EU-labeled Streptavidin 1:1000 in Assay buffer, and add 100 μl/well. Cover the plate and incubate 1 h at RT. Plates are again washed with wash buffer and blotted on paper towels.

[1450] Add 100 μl/well of Enhancement Solution. Shake for 5 minutes. Read the plate on the Wallac DELFIA Fluorometer. Readings from triplicate samples in each assay were tabulated and averaged.

[1451] A positive result in this assay suggests AoSMC cell proliferation and that the polypeptide of the present invention may be involved in dermal fibroblast proliferation and/or smooth muscle cell proliferation. A positive result also suggests many potential uses of polypeptides, polynucleotides, agonists and/or antagonists of the polynucleotide/polypeptide of the present invention which gives a positive result. For example, inflammation and immune responses, wound healing, and angiogenesis, as detailed throughout this specification. Particularly, polypeptides of the present invention and polynucleotides of the present invention may be used in wound healing and dermal regeneration, as well as the promotion of vasculogenesis, both of the blood vessels and lymphatics. The growth of vessels can be used in the treatment of, for example, cardiovascular diseases. Additionally, antagonists of polypeptides and polynucleotides of the invention may be useful in treating diseases, disorders, and/or conditions which involve angiogenesis by acting as an anti-vascular agent (e.g., anti-angiogenesis). These diseases, disorders, and/or conditions are known in the art and/or are described herein, such as, for example, malignancies, solid tumors, benign tumors, for example hemangiomas, acoustic neuromas, neurofibromas, trachomas, and pyogenic granulomas; artheroscleric plaques; ocular angiogenic diseases, for example, diabetic retinopathy, retinopathy of prematurity, macular degeneration, corneal graft rejection, neovascular glaucoma, retrolental fibroplasia, rubeosis, retinoblastoma, uvietis and Pterygia (abnormal blood vessel growth) of the eye; rheumatoid arthritis; psoriasis; delayed wound healing; endometriosis; vasculogenesis; granulations; hypertrophic scars (keloids); nonunion fractures; scleroderma; trachoma; vascular adhesions; myocardial angiogenesis; coronary collaterals; cerebral collaterals; arteriovenous malformations; ischemic limb angiogenesis; Osler-Webber Syndrome; plaque neovascularization; telangiectasia; hemophiliac joints; angiofibroma; fibromuscular dysplasia; wound granulation; Crohn's disease; and atherosclerosis. Moreover, antagonists of polypeptides and polynucleotides of the invention may be useful in treating anti-hyperproliferative diseases and/or anti-inflammatory known in the art and/or described herein.

[1452] One skilled in the art could easily modify the exemplified studies to test the activity of polynucleotides (e.g., gene therapy), antibodies, agonists, and/or antagonists and fragments and variants thereof.

### Example 43

### Cellular Adhesion Molecule (CAM) Expression on Endothelial Cells

[1453] The recruitment of lymphocytes to areas of inflammation and angiogenesis involves specific receptor-ligand interactions between cell surface adhesion molecules (CAMs) on lymphocytes and the vascular endothelium. The adhesion process, in both normal and pathological settings, follows a multi-step cascade that involves intercellular adhesion molecule-1 (ICAM-1), vascular cell adhesion molecule-1 (VCAM-1), and endothelial leukocyte adhesion molecule-1 (E-selectin) expression on endothelial cells (EC). The expression of these molecules and others on the vascular endothelium determines the efficiency with which leukocytes may adhere to the local vasculature and extravasate into the local tissue during the development of an inflammatory response. The local concentration of cytokines and growth factor participate in the modulation of the expression of these CAMs.

[1454] Briefly, endothelial cells (e.g., Human Umbilical Vein Endothelial cells (HUVECs)) are grown in a standard 96 well plate to confluence, growth medium is removed from the cells and replaced with 100 μl of 199 Medium (10% fetal bovine serum (FBS)). Samples for testing and positive or negative controls are added to the plate in triplicate (in 10 μl volumes). Plates are then incubated at 37° C. for either 5 h (selectin and integrin expression) or 24 h (integrin expression only). Plates are aspirated to remove medium and 100 μl of 0.1% paraformaldehyde-PBS(with Ca++ and Mg++) is added to each well. Plates are held at 4° C. for 30 min. Fixative is removed from the wells and wells are washed 1× with PBS(+Ca,Mg)+0.5% BSA and drained. 10 μl of diluted primary antibody is added to the test and control wells. Anti-ICAM-1-Biotin, Anti-VCAM-1-Biotin and Anti-E-selectin-Biotin are used at a concentration of 10 μg/ml (1:10 dilution of 0.1 mg/ml stock antibody). Cells are incubated at 37° C. for 30 min. in a humidified environment. Wells are washed three times with PBS(+Ca,Mg)+0.5% BSA. 20 μl of diluted ExtrAvidin-Alkaline Phosphatase (1:5,000 dilution, referred to herein as the working dilution) are added to each well and incubated at 37° C. for 30 min. Wells are washed three times with PBS(+Ca,Mg)+0.5% BSA. Dissolve 1 tablet of p-Nitrophenol Phosphate pNPP per 5 ml of glycine buffer (pH 10.4). 100 μl of pNPP substrate in glycine buffer is added to each test well. Standard wells in triplicate are prepared from the working dilution of the ExtrAvidin-Alkaline Phosphotase in glycine buffer: 1:5,000 (10⁰)>10^{-0.5}>10⁻¹>10^{-1.5} 0.5 μl of each dilution is added to triplicate wells and the resulting AP content in each well is 5.50 ng, 1.74 ng, 0.55 ng, 0.18 ng. 100 μl of pNNP reagent is then added to each of the standard wells. The plate is incubated at 37° C. for 4h. A volume of 50 μl of 3M NaOH is added to all wells. The plate is read on a plate reader at 405 nm using the background subtraction option on blank wells filled with glycine buffer only. Additionally, the template is set up to indicate the concentration of AP-conjugate in each standard well [5.50 ng; 1.74 ng; 0.55 ng; 0.18 ng]. Results are indicated as amount of bound AP-conjugate in each sample.

### Example 44

### Alamar Blue Endothelial Cells Proliferation Assay

[1455] This assay may be used to quantitatively determine protein mediated inhibition of bFGF-induced proliferation of Bovine Lymphatic Endothelial Cells (LECs), Bovine Aortic Endothelial Cells (BAECs) or Human Microvascular Uterine Myometrial Cells (UTMECs). This assay incorporates a fluorometric growth indicator based on detection of metabolic activity. A standard Alamar Blue Proliferation Assay is prepared in EGM-2MV with 10 ng/ml of bFGF added as a source of endothelial cell stimulation. This assay may be used with a variety of endothelial cells with slight changes in growth medium and cell concentration. Dilutions of the protein batches to be tested are diluted as appropriate. Serum-free medium (GIBCO SFM) without bFGF is used as a non-stimulated control and Angiostatin or TSP-1 are included as a known inhibitory controls.

[1456] Briefly, LEC, BAECs or UTMECs are seeded in growth media at a density of 5000 to 2000 cells/well in a 96 well plate and placed at 37 degreesC. overnight. After the overnight incubation of the cells, the growth media is removed and replaced with GIBCO EC-SFM. The cells are treated with the appropriate dilutions of the protein of interest or control protein sample(s) (prepared in SFM ) in triplicate wells with additional bFGF to a concentration of 10 ng/ml. Once the cells have been treated with the samples, the plate(s) is/are placed back in the 37° C. incubator for three days. After three days 10 ml of stock alamar blue (Biosource Cat#DAL1100) is added to each well and the plate(s) is/are placed back in the 37° C. incubator for four hours. The plate(s) are then read at 530 nm excitation and 590 nm emission using the CytoFluor fluorescence reader. Direct output is recorded in relative fluorescence units.

[1457] Alamar blue is an oxidation-reduction indicator that both fluoresces and changes color in response to chemical reduction of growth medium resulting from cell growth. As cells grow in culture, innate metabolic activity results in a chemical reduction of the immediate surrounding environment. Reduction related to growth causes the indicator to change from oxidized (non-fluorescent blue) form to reduced (fluorescent red) form (i.e., stimulated proliferation will produce a stronger signal and inhibited proliferation will produce a weaker signal and the total signal is proportional to the total number of cells as well as their metabolic activity). The background level of activity is observed with the starvation medium alone. This is compared to the output observed from the positive control samples (bFGF in growth medium) and protein dilutions.

### Example 45

### Detection of Inhibition of a Mixed Lymphocyte Reaction

[1458] This assay can be used to detect and evaluate inhibition of a Mixed Lymphocyte Reaction (MLR) by gene products (e.g., isolated polypeptides). Inhibition of a MLR may be due to a direct effect on cell proliferation and viability, modulation of costimulatory molecules on interacting cells, modulation of adhesiveness between lymphocytes and accessory cells, or modulation of cytokine production by accessory cells. Multiple cells may be targeted by these polypeptides since the peripheral blood mononuclear fraction used in this assay includes T, B and natural killer lymphocytes, as well as monocytes and dendritic cells.

[1459] Polypeptides of interest found to inhibit the MLR may find application in diseases associated with lymphocyte and monocyte activation or proliferation. These include, but are not limited to, diseases such as asthma, arthritis, diabetes, inflammatory skin conditions, psoriasis, eczema, systemic lupus erythematosus, multiple sclerosis, glomerulonephritis, inflammatory bowel disease, crohn's disease, ulcerative colitis, arteriosclerosis, cirrhosis, graft vs. host disease, host vs. graft disease, hepatitis, leukemia and lymphoma.

[1460] Briefly, PBMCs from human donors are purified by density gradient centrifugation using Lymphocyte Separation Medium (LSM®, density 1.0770 g/ml, Organon Teknika Corporation, West Chester, Pa.). PBMCs from two donors are adjusted to 2×10⁶ cells/ml in RPMI-1640 (Life Technologies, Grand Island, N.Y.) supplemented with 10% FCS and 2 mM glutamine. PBMCs from a third donor is adjusted to 2×10⁵ cells/ml. Fifty microliters of PBMCs from each donor is added to wells of a 96-well round bottom microtiter plate. Dilutions of test materials (50 μl) is added in triplicate to microtiter wells. Test samples (of the protein of interest) are added for final dilution of 1:4; rhuIL-2 (R&D Systems, Minneapolis, Minn., catalog number 202-IL) is added to a final concentration of 1 μg/ml; anti-CD4 mAb (R&D Systems, clone 34930.11, catalog number MAB379) is added to a final concentration of 10 μg/ml. Cells are cultured for 7-8 days at 37° C. in 5% CO₂, and 1 μC of [³H] thymidine is added to wells for the last 16 hrs of culture. Cells are harvested and thymidine incorporation determined using a Packard TopCount. Data is expressed as the mean and standard deviation of triplicate determinations.

[1461] Samples of the protein of interest are screened in separate experiments and compared to the negative control treatment, anti-CD4 mAb, which inhibits proliferation of lymphocytes and the positive control treatment, IL-2 (either as recombinant material or supernatant), which enhances proliferation of lymphocytes.

[1462] One skilled in the art could easily modify the exemplified studies to test the activity of polynucleotides (e.g., gene therapy), antibodies, agonists, and/or antagonists and fragments and variants thereof.

### Example 46

### Assays for Protease Activity

[1463] The following assay may be used to assess protease activity of the polypeptides of the invention.

[1464] Gelatin and casein zymography are performed essentially as described (Heusen et al., Anal. Biochem., 102:196-202 (1980); Wilson et al., Journal of Urology, 149:653-658 (1993)). Samples are run on 10% polyacryamide/0.1% SDS gels containing 1% gelain orcasein, soaked in 2.5% triton at room temperature for 1 hour, and in 0.1M glycine, pH 8.3 at 37° C. 5 to 16 hours. After staining in amido black areas of proteolysis apear as clear areas agains the blue-black background. Trypsin (Sigma T8642) is used as a positive control.

[1465] Protease activity is also determined by monitoring the cleavage of n-a-benzoyl-L-arginine ethyl ester (BAEE) (Sigma B-4500. Reactions are set up in (25 mMNaPO₄,1mM EDTA, and 1 mM BAEE), pH 7.5. Samples are added and the change in adsorbance at 260 nm is monitored on the Beckman DU-6 spectrophotometer in the time-drive mode. Trypsin is used as a positive control.

[1466] Additional assays based upon the release of acid-soluble peptides from casein or hemoglobin measured as adsorbance at 280 nm or colorimetrically using the Folin method are performed as described in Bergmeyer, et al., Methods of Enzymatic Analysis, 5 (1984). Other assays involve the solubilization of chromogenic substrates (Ward, Applied Science, 251-317 (1983)).

### Example 47

### Identifying Serine Protease Substrate Specificity

[1467] Methods known in the art or described herein may be used to determine the substrate specificity of the polypeptides of the present invention having serine protease. activity. A preferred method of determining substrate specificity is by the use of positional scanning synthetic combinatorial libraries as described in GB 2 324 529 (incorporated herein in its entirety).

### Example 48

### Ligand Binding Assays

[1468] The following assay may be used to assess ligand binding activity of the polypeptides of the invention.

[1469] Ligand binding assays provide a direct method for ascertaining receptor pharmacology and are adaptable to a high throughput format. The purified ligand for a polypeptide is radiolabeled to high specific activity (50-2000 Ci/mmol) for binding studies. A determination is then made that the process of radiolabeling does not diminish the activity of the ligand towards its polypeptide. Assay conditions for buffers, ions, pH and other modulators such as nucleotides are optimized to establish a workable signal to noise ratio for both membrane and whole cell polypeptide sources. For these assays, specific polypeptide binding is defined as total associated radioactivity minus the radioactivity measured in the presence of an excess of unlabeled competing ligand. Where possible, more than one competing ligand is used to define residual nonspecific binding.

### Example 49

### Functional Assay in Xenopus Oocytes

[1470] Capped RNA transcripts from linearized plasmid templates encoding the polypeptides of the invention are synthesized in vitro with RNA polymerases in accordance with standard procedures. In vitro transcripts are suspended in water at a final concentration of 0.2 mg/mi. Ovarian lobes are removed from adult female toads, Stage V defolliculated oocytes are obtained, and RNA transcripts (10 ng/oocytc) are injected in a 50 nl bolus using a microinjection apparatus. Two electrode voltage clamps are used to measure the currents from individual Xenopus oocytes in response polypeptides and polypeptide agonist exposure. Recordings are made in Ca2+ free Barth's medium at room temperature. The Xenopus system can be used to screen known ligands and tissue/cell extracts for activating ligands.

### Example 50

### Microphysiometric Assays

[1471] Activation of a wide variety of secondary messenger systems results in extrusion of small amounts of acid from a cell. The acid formed is largely as a result of the increased metabolic activity required to fuel the intracellular signaling process. The pH changes in the media surrounding the cell are very small but are detectable by the CYTOSENSOR microphysiometer (Molecular Devices Ltd., Menlo Park, Calif.). The CYTOSENSOR is thus capable of detecting the activation of polypeptide which is coupled to an energy utilizing intracellular signaling pathway.

### Example 51

### Extract/Cell Supernatant Screening

[1472] A large number of mammalian receptors exist for which there remains, as yet, no cognate activating ligand (agonist). Thus, active ligands for these receptors may not be included within the ligands banks as identified to date. Accordingly, the polypeptides of the invention can also be functionally screened (using calcium, cAMP, microphysiometer, oocyte electrophysiology, etc., functional screens) against tissue extracts to identify its natural ligands. Extracts that produce positive functional responses can be sequentially subfractionated until an activating ligand is isolated and identified.

### Example 52

### Calcium and cAMP Functional Assays

[1473] Seven transmembrane receptors which are expressed in HEK 293 cells have been shown to be coupled functionally to activation of PLC and calcium mobilization and/or cAMP stimulation or inhibition. Basal calcium levels in the HEK 293 cells in receptor-transfected or vector control cells were observed to be in the normal, 100 nM to 200 nM, range. HEK 293 cells expressing recombinant receptors are loaded with fura 2 and in a single day >150 selected ligands or tissue/cell extracts are evaluated for agonist induced calcium mobilization. Similarly, HEK 293 cells expressing recombinant receptors are evaluated for the stimulation or inhibition of cAMP production using standard cAMP quantitation assays. Agonists presenting a calcium transient or cAMP fluctuation are tested in vector control cells to determine if the response is unique to the transfected cells expressing receptor.

### Example 53

### ATP-Binding Assay

[1474] The following assay may be used to assess ATP-binding activity of polypeptides of the invention.

[1475] ATP-binding activity of the polypeptides of the invention may be detected using the ATP-binding assay described in U.S. Pat. No. 5,858,719, which is herein incorporated by reference in its entirety. Briefly, ATP-binding to polypeptides of the invention is measured via photoaffinity labeling with 8-azido-ATP in a competition assay. Reaction mixtures containing 1 mg/ml of the ABC transport protein of the present invention are incubated with varying concentrations of ATP, or the non-hydrolyzable ATP analog adenyl-5′-imidodiphosphate for 10 minutes at 4° C. A mixture of 8-azido-ATP (Sigma Chem. Corp., St. Louis, Mo.) plus 8-azido-ATP (³²P-ATP) (5 mCi/μmol, ICN, Irvine Calif.) is added to a final concentration of 100 μM and 0.5 ml aliquots are placed in the wells of a porcelain spot plate on ice. The plate is irradiated using a short wave 254 nm UV lamp at a distance of 2.5 cm from the plate for two one-minute intervals with a one-minute cooling interval in between. The reaction is stopped by addition of dithiothreitol to a final concentration of 2 mM. The incubations are subjected to SDS-PAGE electrophoresis, dried, and autoradiographed. Protein bands corresponding to the particular polypeptides of the invention are excised, and the radioactivity quantified. A decrease in radioactivity with increasing ATP or adenly-5′-imidodiphosphate provides a measure of ATP affinity to the polypeptides.

### Example 54

### Small Molecule Screening

[1476] This invention is particularly useful for screening therapeutic compounds by using the polypeptides of the invention, or binding fragments thereof, in any of a variety of drug screening techniques. The polypeptide or fragment employed in such. a test may be affixed. to a solid support, expressed on a cell surface, free in solution, or located intracellularly. One method of drug screening utilizes eukaryotic or prokaryotic host cells which are stably transformed with recombinant nucleic acids expressing the polypeptide or fragment. Drugs are screened against such transformed cells in competitive binding assays. One may measure, for example, the formulation of complexes between the agent being tested and polypeptide of the invention.

[1477] Thus, the present invention provides methods of screening for drugs or any other agents which affect activities mediated by the polypeptides of the invention. These methods comprise contacting such an agent with a polypeptide of the invention or fragment thereof and assaying for the presence of a complex between the agent and the polypeptide or fragment thereof, by methods well known in the art. In such a competitive binding assay, the agents to screen are typically labeled. Following incubation, free agent is separated from that present in bound form, and the amount of free or uncomplexed label is a measure of the ability of a particular agent to bind to the polypeptides of the invention.

[1478] Another technique for drug screening provides high throughput screening for compounds having suitable binding affinity to the polypeptides of the invention, and is described in great detail in European Patent Application 84/03564, published on Sep. 13, 1984, which is herein incorporated by reference in its entirety. Briefly stated, large numbers of different small molecule test compounds are synthesized on a solid substrate, such as plastic pins or some other surface. The test compounds are reacted with polypeptides of the invention and washed. Bound polypeptides are then detected by methods well known in the art. Purified polypeptides are coated directly onto plates for use in the aforementioned drug screening techniques. In addition, non-neutralizing antibodies may be used to capture the peptide and immobilize it on the solid support.

[1479] This invention also contemplates the use of competitive drug screening assays in which neutralizing antibodies capable of binding polypeptides of the invention specifically compete with a test compound for binding to the polypeptides or fragments thereof. In this manner, the antibodies are used to detect the presence of any peptide which shares one or more antigenic epitopes with a polypeptide of the invention.

### Example 55

### Phosphorylation Assay

[1480] In order to assay for phosphorylation activity of the polypeptides of the invention, a phosphorylation assay as described in U.S. Pat. No. 5,958,405 (which is herein incorporated by reference) is utilized. Briefly, phosphorylation activity may be measured by phosphorylation of a protein substrate using gamma-labeled ³²P-ATP and quantitation of the incorporated radioactivity using a gamma radioisotope counter. The polypeptides of the invention are incubated with the protein substrate, ³²P-ATP, and a kinase buffer. The ³²P incorporated into the substrate is then separated from free ³²P-ATP by electrophoresis, and the incorporated ³²P is counted and compared to a negative control. Radioactivity counts above the negative control are indicative of phosphorylation activity of the polypeptides of the invention.

### Example 56

### Detection of Phosphorylation Activity (Activation) of the Polypeptides of the Invention in the Presence of Polypeptide Ligands

[1481] Methods known in the art or described herein may be used to determine the phosphorylation activity of the polypeptides of the invention. A preferred method of determining phosphorylation activity is by the use of the tyrosine phosphorylation assay as described in U.S. Pat. No. 5,817,471 (incorporated herein by reference).

### Example 57

### Identification of Signal Transduction Proteins that Interact with Polypeptides of the Present Invention

[1482] The purified polypeptides of the invention are research tools for the identification, characterization and purification of additional signal transduction pathway proteins or receptor proteins. Briefly, labeled polypeptides of the invention are useful as reagents for the purification of molecules with which it interacts. In one embodiment of affinity purification, polypeptides of the invention are covalently coupled to a chromatography column. Cell-free extract derived from putative target cells, such as carcinoma tissues, is passed over the column, and molecules with appropriate affinity bind to the polypeptides of the invention. The protein complex is recovered from the column, dissociated, and the recovered molecule subjected to N-terminal protein sequencing. This amino acid sequence is then used to identify the captured molecule or to design degenerate oligonucleotide probes for cloning the relevant gene from an appropriate cDNA library.

### Example 58

### IL-6 Bioassay

[1483] To test the proliferative effects of the polypeptides of the invention, the IL-6 Bioassay as described by Marz et al. is utilized (Proc. Natl. Acad. Sci., U.S.A., 95:3251-56 (1998), which is herein incorporated by reference). Briefly, IL-6 dependent B9 murine cells are washed three times in IL-6 free medium and plated at a concentration of 5,000 cells per well in 50 μl, and 50 μl of the IL-6-like polypeptide is added. After 68 hrs. at 37° C., the number of viable cells is measured by adding the tetrazolium salt thiazolyl blue (MTT) and incubating for a further 4 hrs. at 37° C. B9 cells are lysed by SDS and optical density is measured at 570 nm. Controls containing IL-6 (positive) and no cytokine (negative) are utilized. Enhanced proliferation in the test sample(s) relative to the negative control is indicative of proliferative effects mediated by polypeptides of the invention.

### Example 59

### Support of Chicken Embryo Neuron Survival

[1484] To test whether sympathetic neuronal cell viability is supported by polypeptides of the invention, the chicken embryo neuronal survival assay of Senaldi et al is utilized (Proc. Natl. Acad. Sci., U.S.A., 96:11458-63 (1998), which is herein incorporated by reference). Briefly, motor and sympathetic neurons are isolated from chicken embryos, resuspended in L15 medium (with 10% FCS, glucose, sodium selenite, progesterone, conalbumin, putrescine, and insulin; Life Technologies, Rockville, Md.) and Dulbecco's modified Eagles medium [with 10% FCS, glutamine, penicillin, and 25 mM Hepes buffer (pH 7.2); Life Technologies, Rockville, Md.], respectively, and incubated at 37° C. in 5% CO₂ in the presence of different concentrations of the purified IL-6-like polypeptide, as well as a negative control lacking any cytokine. After 3 days, neuron survival is determined by evaluation of cellular morphology, and through the use of the colorimetric assay of Mosmann (Mosmann, T., J. Immunol. Methods, 65:55-63 (1983)). Enhanced neuronal cell viability as compared to the controls lacking cytokine is indicative of the ability of the inventive purified IL-6-like polypeptide(s) to enhance the survival of neuronal cells.

### Example 60

### Assay for Phosphatase Activity

[1485] The following assay may be used to assess serine/threonine phosphatase (PTPase) activity of the polypeptides of the invention.

[1486] In order to assay for serine/threonine phosphatase (PTPase) activity, assays can be utilized which are widely known to those skilled in the art. For example, the serine/threonine phosphatase (PSPase) activity is measured using a PSPase assay kit from New England Biolabs, Inc. Myelin basic protein (MyBP), a substrate for PSPase, is phosphorylated on serine and threonine residues with cAMP-dependent Protein Kinase in the presence of [³²P]ATP. Protein serine/threonine phosphatase activity is then determined by measuring the release of inorganic phosphate from 32P-labeled MyBP.

### Example 61

### Interaction of Serine/Threonine Phosphatases with other Proteins

[1487] The polypeptides of the invention with serine/threonine phosphatase activity as determined in Example 60 are research tools for the identification, characterization and purification of additional interacting proteins or receptor proteins, or other signal transduction pathway proteins. Briefly, labeled polypeptide(s) of the invention is useful as a reagent for the purification of molecules with which it interacts. In one embodiment of affinity purification, polypeptide of the invention is covalently coupled to a chromatography column. Cell-free extract derived from putative target cells, such as neural or liver cells, is passed over the column, and molecules with appropriate affinity bind to the polypeptides of the invention. The polypeptides of the invention-complex is recovered from the column, dissociated, and the recovered molecule subjected to N-terminal protein sequencing. This amino acid sequence is then used to identify the captured molecule or to design degenerate oligonucleotide probes for cloning the relevant gene from an appropriate cDNA library.

### Example 62

### Assaying for Heparanase Activity

[1488] In order to assay for heparanase activity of the polypeptides of the invention, the heparanase assay described by Vlodavsky et al. is utilized (Vlodavsky, I., et al., Nat. Med., 5:793-802 (1999)). Briefly, cell lysates, conditioned media or intact cells (1×10⁶ cells per 35-mm dish) are incubated for 18 hrs at 37° C., pH 6.2-6.6, with ³⁵S-labeled ECM or soluble ECM derived peak I proteoglycans. The incubation medium is centrifuged and the supernatant is analyzed by gel filtration on a Sepharose CL-6B column (0.9×30 cm). Fractions are eluted with PBS and their radioactivity is measured. Degradation fragments of heparan sulfate side chains are eluted from Sepharose 6B at 0.5<Kav <0.8 (peak II). Each experiment is done at least three times. Degradation fragments corresponding to “peak II,” as described by Vlodavsky et al., is indicative of the activity of the polypeptides of the invention in cleaving heparan sulfate.

### Example 63

### Immobilization of Biomolecules

[1489] This example provides a method for the stabilization of polypeptides of the invention in non-host cell lipid bilayer constucts (see, e.g., Bieri et al., Nature Biotech 17:1105-1108 (1999), hereby incorporated by reference in its entirety herein) which can be adapted for the study of polypeptides of the invention in the various functional assays described above. Briefly, carbohydrate-specific chemistry for biotinylation is used to confine a biotin tag to the extracellular domain of the polypeptides of the invention, thus allowing uniform orientation upon immobilization. A 50 uM solution of polypeptides of the invention in washed membranes is incubated with 20 mM NaIO4 and 1.5 mg/ml (4 mM) BACH or 2 mg/ml (7.5 mM) biotin-hydrazide for 1 hr at room temperature (reaction volume, 150 ul). Then the sample is dialyzed (Pierce Slidealizer Cassett, 10 kDa cutoff; Pierce Chemical Co., Rockford IL) at 4C first for 5 h, exchanging the buffer after each hour, and finally for 12 h against 500 ml buffer R (0.15 M NaCl, 1 mM MgCl2, 10 mM sodium phosphate, pH7). Just before addition into a cuvette, the sample is diluted 1:5 in buffer ROG50 (Buffer R supplemented with 50 mM octylglucoside).

### Example 64

### TAQMAN

[1490] Quantitative PCR (QPCR). Total RNA from cells in culture are extracted by Trizol separation as recommended by the supplier (LifeTechnologies). (Total RNA is treated with DNase I (Life Technologies) to remove any contaminating genomic DNA before reverse transcription.) Total RNA (50 ng) is used in a one-step, 50B ul, RT-QPCR, consisting of Taqman Buffer A (Perkin-Elmer; 50 mM KC1/10 mM Tris, pH 8.3), 5.5 mM MgCl₂, 240 μM each dNTP, 0.4 units RNase inhibitor(Promega), 8% glycerol, 0.012% Tween-20, 0.05% gelatin, 0.3 uM primers, 0.1 uM probe, 0.025 units Amplitaq Gold (Perkin-Elmer) and 2.5 units Superscript II reverse transcriptase (Life Technologies). As a control for genomic contamination, parallel reactions are setup without reverse transcriptase. The relative abundance of (unknown) and 18 S RNAs are assessed by using the Applied Biosystems Prism 7700 Sequence Detection System (Livak, K. J., Flood, S. J., Marmaro, J., Giusti, W. & Deetz, K. (1995) PCR Methods Appl. 4, 357-362). Reactions are carried out at 48° C. for 30 min, 95° C. for 10 min, followed by 40 cycles of 95° C. for 5 s, 60° C. for 1 min. Reactions are performed in triplicate.

[1491] Primers (f & r) and FRET probes sets are designed using Primer Express Software (Perkin-Elmer). Probes are labeled at the 5′-end with the reporter dye 6-FAM and on the 3′-end with the quencher dye TAMRA (Biosource International, Camarillo, CALIF. or Perkin-Elmer).

### Example 65

### Assays for Metalloproteinase Activity

[1492] Metalloproteinases (EC 3.4.24.-) are peptide hydrolases which use metal ions, such as Zn²⁺, as the catalytic mechanism. Metalloproteinase activity of polypeptides of the present invention can be assayed according to the following methods.

### Proteolysis of alpha-2-macroglobulin

[1493] To confirm protease activity, purified polypeptides of the invention are mixed with the substrate alpha-2-macroglobulin (0.2 unit/ml; Boehringer Mannheim, Germany) in 1× assay buffer (50 mM HEPES, pH 7.5, 0.2 M NaCl, 10 mM CaCl₂, 25 μM ZnCl₂ and 0.05% Brij-35) and incubated at 37° C. for 1-5 days. Trypsin is used as positive control. Negative controls contain only alpha-2-macroglobulin in assay buffer. The samples are collected and boiled in SDS-PAGE sample buffer containing 5% 2-mercaptoethanol for 5-min, then loaded onto 8% SDS-polyacrylamide gel. After electrophoresis the proteins are visualized by silver staining. Proteolysis is evident by the appearance of lower molecular weight bands as compared to the negative control.

### Inhibition of alpha-2-macroglobulin proteolysis by inhibitors of metalloproteinases

[1494] Known metalloproteinase inhibitors (metal chelators (EDTA, EGTA, AND HgCl₂), peptide metalloproteinase inhibitors (TIMP-1 and TIMP-2), and commercial small molecule MMP inhibitors) are used to characterize the proteolytic activity of polypeptides of the invention. The three synthetic MMP inhibitors used are: MMP inhibitor I, [IC₅₀=1.0 μM against MMP-1 and MMP-8; IC₅₀=30 μM against MMP-9; IC₅₀=150 μM against MMP-3]; MMP-3 (stromelysin-1) inhibitor I [IC₅₀=5 μM against MMP-3], and MMP-3 inhibitor II [Kᵢ=130 nM against MMP-3]; inhibitors available through Calbiochem, catalog #444250, 444218, and 444225, respectively). Briefly, different concentrations of the small molecule MMP inhibitors are mixed with purified polypeptides of the invention (50 μg/ml) in 22.9 μl of 1× HEPES buffer (50 mM HEPES, pH 7.5, 0.2 M NaCl, 10 mM CaCl₂, 25 μM ZnCl₂ and 0.05% Brij-35) and incubated at room temperature (24° C.) for 2-hr, then 7.1 μl of substrate alpha-2-macroglobulin (0.2 unit/ml) is added and incubated at 37° C. for 20-hr. The reactions are stopped by adding 4× sample buffer and boiled immediately for 5 minutes. After SDS-PAGE, the protein bands are visualized by silver stain.

### Synthetic Fluorogenic Peptide Substrates Cleavage Assay

[1495] The substrate specificity for polypeptides of the invention with demonstrated metalloproteinase activity can be determined using synthetic fluorogenic peptide substrates (purchased from BACHEM Bioscience Inc). Test substrates include, M-1985, M-2225, M-2105, M-2110, and M-2255. The first four are MMP substrates and the last one is a substrate of tumor necrosis factor-α (TNF-α) converting enzyme (TACE). All the substrates are prepared in 1:1 dimethyl sulfoxide (DMSO) and water. The stock solutions are 50-500 μM. Fluorescent assays are performed by using a Perkin Elmer LS 50B luminescence spectrometer equipped with a constant temperature water bath. The excitation λ is 328 nm and the emission λ is 393 nm. Briefly, the assay is carried out by incubating 176 μl 1× HEPES buffer (0.2 M NaCl, 10 mM CaCl₂, 0.05% Brij-35 and 50 mM HEPES, pH 7.5) with 4 μl of substrate solution (50 μM) at 25° C. for 15 minutes, and then adding 20 μl of a purified polypeptide of the invention into the assay cuvett. The final concentration of substrate is 1 μM. Initial hydrolysis rates are monitored for 30-min.

### Example 66

### Characterization of the cDNA Contained in a Deposited Plasmid

[1496] The size of the cDNA insert contained in a deposited plasmid may be routinely determined using techniques known in the art, such as PCR amplification using synthetic primers hybridizable to the 3′ and 5′ ends of the cDNA sequence. For example, two primers of 17-30 nucleotides derived from each end of the cDNA (i.e., hybridizable to the absolute 5′ nucleotide or the 3′ nucleotide end of the sequence of SEQ ID NO:X, respectively) are synthesized and used to amplify the cDNA using the deposited cDNA plasmid as a template. The polymerase chain reaction is carried out under routine conditions, for instance, in 25 ul of reaction mixture with 0.5 ug of the above cDNA template. A convenient reaction mixture is 1.5-5 mM MgCl₂, 0.01% (w/v) gelatin, 20 uM each of dATP, dCTP, dGTP, dTTP, 25 pmol of each primer and 0.25 Unit of Taq polymerase. Thirty five cycles of PCR (denaturation at 94 degree C. for 1 min; annealing at 55 degree C. for 1 min; elongation at 72 degree C. for 1 min) are performed with a Perkin-Elmer Cetus automated thermal cycler. The amplified product is analyzed by agarose gel electrophoresis. The PCR product is verified to be the selected sequence by subcloning and sequencing the DNA product.It will be clear that the invention may be practiced otherwise than as particularly described in the foregoing description and examples. Numerous modifications and variations of the present invention are possible in light of the above teachings and, therefore, are within the scope of the appended claims.

Incorporation by Reference

[1497] The entire disclosure of each document cited (including patents, patent applications, patent publications, journal articles, abstracts, laboratory manuals, books, or other disclosures) as well as information available through Identifiers specific to databases such as GenBank, GeneSeq, or the CAS Registry, referred to in this application are herein incorporated by reference in their entirety.

[1498] Furthermore, the specification and sequence listing of each of the following U.S. provisional applications and the following International applications are herein incorporated by reference in their entirety: U.S. provisional Application No. 60/311,085 filed Aug. 10, 2001; International Application No. PCT/JUS02/25107 filed Aug. 8, 2002; U.S. provisional Application No. 60/325,209 filed Sep. 28, 2001; U.S. provisional Application No. 60/330,629 filed Oct. 26, 2001; International Application No. PCT/US02/33985 filed Oct. 24, 2002; U.S. provisional Application No. 60/331,046 filed Nov. 7, 2001; International Application No. PCT/US02/35606 filed Nov. 6, 2002; U.S. provisional Application No. 60/358,554 filed Feb. 22, 2002; International Application No. PCT/US03/04819 filed Feb. 20, 2003; U.S. provisional Application No. 60/358,714 filed Feb. 25, 2002; International Application No. PCT/US03/04818 filed Feb. 20, 2003.

1. Use of a polypeptide for the preparation of a diagnostic or pharmaceutical composition for diagnosing or treating a medical condition, wherein said polypeptide comprises an amino acid sequence at least 95% identical to a sequence selected from the group consisting of:
(a) a full length polypeptide of SEQ ID NO:Y or a full length polypeptide encoded by the cDNA Clone ID in ATCC Deposit No:Z corresponding to SEQ ID NO:Y as referenced in Table 1A;
(b) a predicted secreted form of SEQ ID NO:Y or a secreted form of the polypeptide encoded by the cDNA Clone ID in ATCC Deposit No:Z corresponding to SEQ ID NO:Y as referenced in Table 1A;
(c) a polypeptide fragment of SEQ ID NO:Y or a polypeptide fragment encoded by the cDNA Clone ID in ATCC Deposit No:Z corresponding to SEQ ID NO:Y as referenced in Table 1A;
(d) a polypeptide fragment of SEQ ID NO:Y or a polypeptide fragment encoded by the cDNA Clone ID in ATCC Deposit No:Z corresponding to SEQ ID NO:Y as referenced in Table 1A, wherein said fragment has biological activity;
(e) a polypeptide domain of SEQ ID NO:Y as referenced in Table 1B;
(f) a polypeptide domain of SEQ ID NO:Y as referenced in Table 2; and
(g) a predicted epitope of SEQ ID NO:Y as referenced in Table 1B.

2. Use of the polypeptide of claim 1, wherein said wherein said polypeptide comprises a heterologous amino acid sequence.

3. Use of an antibody or fragment thereof for the preparation of a diagnostic or pharmaceutical composition for diagnosing or treating a medical condition, wherein said antibody or fragment thereof binds a polypeptide comprising an amino acid sequence at least 95% identical to a sequence selected from the group consisting of:
(a) a full length polypeptide of SEQ ID NO:Y or a full length polypeptide encoded by the cDNA Clone ID in ATCC Deposit No:Z corresponding to SEQ ID NO:Y as referenced in Table 1A;
(b) a predicted secreted form of SEQ ID NO:Y or a secreted form of the polypeptide encoded by the cDNA Clone ID in ATCC Deposit No:Z corresponding to SEQ ID NO:Y as referenced in Table 1A;
(c) a polypeptide fragment of SEQ ID NO:Y or a polypeptide fragment encoded by the cDNA Clone ID in ATCC Deposit No:Z corresponding to SEQ ID NO:Y as referenced in Table 1A;
(d) a polypeptide fragment of SEQ ID NO:Y or a polypeptide fragment encoded by the cDNA Clone ID in ATCC Deposit No:Z corresponding to SEQ ID NO:Y as referenced in Table 1A, wherein said fragment has biological activity;
(e) a polypeptide domain of SEQ ID NO:Y as referenced in Table 1B;
(f) a polypeptide domain of SEQ ID NO:Y as referenced in Table 2; and
(g) a predicted epitope of SEQ ID NO:Y as referenced in Table 1B.

4. Use of a nucleic acid molecule for the preparation of a diagnostic or pharmaceutical composition for diagnosing or treating a medical condition, wherein said nucleic acid molecule comprises a polynucleotide sequence at least 95% identical to a sequence selected from the group consisting of:
(a) a polynucleotide fragment of SEQ ID NO:X as referenced in Table 1A;
(b) a polynucleotide encoding a full length polypeptide of SEQ ID NO:Y or a full length polypeptide encoded by the cDNA Clone ID in ATCC Deposit No:Z corresponding to SEQ ID NO:Y as referenced in Table 1A;
(c) a polynucleotide encoding a predicted secreted form of SEQ ID NO:Y or a secreted form of the polypeptide encoded by the cDNA Clone ID in ATCC Deposit No:Z corresponding to SEQ ID NO:Y as referenced in Table 1A;
(d) a polynucleotide encoding a polypeptide fragment of SEQ ID NO:Y or a polypeptide fragment encoded by the cDNA Clone ID in ATCC Deposit No:Z corresponding to SEQ ID NO:Y as referenced in Table 1A;
(e) a polynucleotide encoding a polypeptide fragment of SEQ ID NO:Y or a polypeptide fragment encoded by the cDNA Clone ID in ATCC Deposit No:Z corresponding to SEQ ID NO:Y as referenced in Table 1A, wherein said fragment has biological activity;
(f) a polynucleotide encoding a polypeptide domain of SEQ ID NO:Y as referenced in Table 1B;
(g) a polynucleotide encoding a polypeptide domain of SEQ ID NO:Y as referenced in Table 2; and
(h) a polynucleotide encoding a predicted epitope of SEQ ID NO:Y as referenced in Table 1B.

5. Use of the nucleic acid molecule of claim 4, wherein said nucleic acid molecule comprises a heterologous polynucleotide sequence.

6. Use of an agonist or antagonist for the preparation of a pharmaceutical composition for treating a medical condition, wherein said agonist or antagonist binds a polypeptide comprising an amino acid sequence at least 95% identical to a sequence selected from the group consisting of:
(a) a full length polypeptide of SEQ ID NO:Y or a full length polypeptide encoded by the cDNA Clone ID in ATCC Deposit No:Z corresponding to SEQ ID NO:Y as referenced in Table 1A;
(b) a predicted secreted form of SEQ ID NO:Y or a secreted form of the polypeptide encoded by the cDNA Clone ID in ATCC Deposit No:Z corresponding to SEQ ID NO:Y as referenced in Table 1A;
(c) a polypeptide fragment of SEQ ID NO:Y or a polypeptide fragment encoded by the cDNA Clone ID in ATCC Deposit No:Z corresponding to SEQ ID NO:Y as referenced in Table 1A;
(d) a polypeptide fragment of SEQ ID NO:Y or a polypeptide fragment encoded by the cDNA Clone ID in ATCC Deposit No:Z corresponding to SEQ ID NO:Y as referenced in Table 1A, wherein said fragment has biological activity;
(e) a polypeptide domain of SEQ ID NO:Y as referenced in Table 1B;
(f) a polypeptide domain of SEQ ID NO:Y as referenced in Table 2; and
(g) a predicted epitope of SEQ ID NO:Y as referenced in Table 1B.

7. A polypeptide comprising an amino acid sequence at least 95% identical to a sequence selected from the group consisting of:
(a) a full length polypeptide of SEQ ID NO:Y or a full length polypeptide encoded by the cDNA Clone ID in ATCC Deposit No:Z corresponding to SEQ ID NO:Y as referenced in Table 1A;
(b) a predicted secreted form of SEQ ID NO:Y or a secreted form of the polypeptide encoded by the cDNA Clone ID in ATCC Deposit No:Z corresponding to SEQ ID NO:Y as referenced in Table 1A;
(c) a polypeptide fragment of SEQ ID NO:Y or a polypeptide fragment encoded by the cDNA Clone ID in ATCC Deposit No:Z corresponding to SEQ ID NO:Y as referenced in Table 1A;
(d) a polypeptide fragment of SEQ ID NO:Y or a polypeptide fragment encoded by the cDNA Clone ID in ATCC Deposit No:Z corresponding to SEQ ID NO:Y as referenced in Table 1A, wherein said fragment has biological activity;
(e) a polypeptide domain of SEQ ID NO:Y as referenced in Table 1B;
(f) a polypeptide domain of SEQ ID NO:Y as referenced in Table 2; and
(g) a predicted epitope of SEQ ID NO:Y as referenced in Table 1B.

8. The polypeptide of claim 7, wherein said polypeptide comprises a heterologous amino acid sequence.

9. Use of the polypeptide of claim 7 for identifying a binding partner comprising:
(a) contacting the polypeptide of claim 7 with a binding partner; and
(b) determining whether the binding partner increases or decreases activity of the polypeptide.

10. An antibody or fragment thereof that binds a polypeptide comprising an amino acid sequence at least 95% identical to a sequence selected from the group consisting of:
(a) a full length polypeptide of SEQ ID NO:Y or a full length polypeptide encoded by the cDNA Clone ID in ATCC Deposit No:Z corresponding to SEQ ID NO:Y as referenced in Table 1A;
(b) a predicted secreted form of SEQ ID NO:Y or a secreted form of the polypeptide encoded by the cDNA Clone ID in ATCC Deposit No:Z corresponding to SEQ ID NO:Y as referenced in Table 1A;
(c) a polypeptide fragment of SEQ ID NO:Y or a polypeptide fragment encoded by the cDNA Clone ID in ATCC Deposit No:Z corresponding to SEQ ID NO:Y as referenced in Table 1A;
(d) a polypeptide fragment of SEQ ID NO:Y or a polypeptide fragment encoded by the cDNA Clone ID in ATCC Deposit No:Z corresponding to SEQ ID NO:Y as referenced in Table 1A, wherein said fragment has biological activity;
(e) a polypeptide domain of SEQ ID NO:Y as referenced in Table 1B;
(f) a polypeptide domain of SEQ ID NO:Y as referenced in Table 2; and
(g) a predicted epitope of SEQ ID NO:Y as referenced in Table 1B.

11. A nucleic acid molecule comprising a polynucleotide sequence at least 95% identical to a sequence selected from the group consisting of:
(a) a polynucleotide fragment of SEQ ID NO:X as referenced in Table 1A;
(b) a polynucleotide encoding a full length polypeptide of SEQ ID NO:Y or a full length polypeptide encoded by the cDNA Clone ID in ATCC Deposit No:Z corresponding to SEQ ID NO:Y as referenced in Table 1A;
(c) a polynucleotide encoding a predicted secreted form of SEQ ID NO:Y or a secreted form of the polypeptide encoded by the cDNA Clone ID in ATCC Deposit No:Z corresponding to SEQ ID NO:Y as referenced in Table 1A;
(d) a polynucleotide encoding a polypeptide fragment of SEQ ID NO:Y or a polypeptide fragment encoded by the cDNA Clone ID in ATCC Deposit No:Z corresponding to SEQ ID NO:Y as referenced in Table 1A;
(e) a polynucleotide encoding a polypeptide fragment of SEQ ID NO:Y or a polypeptide fragment encoded by the cDNA Clone ID in ATCC Deposit No:Z corresponding to SEQ ID NO:Y as referenced in Table 1A, wherein said fragment has biological activity;
(f) a polynucleotide encoding a polypeptide domain of SEQ ID NO:Y as referenced in Table 1B;
(g) a polynucleotide encoding a polypeptide domain of SEQ ID NO:Y as referenced in Table 2; and
(h) a polynucleotide encoding a predicted epitope of SEQ ID NO:Y as referenced in Table 1B.

12. The nucleic acid molecule of claim 11, wherein said nucleic acid molecule comprises a heterologous polynucleotide sequence.

13. A recombinant vector comprising the nucleic acid molecule of claim 11.

14. A recombinant host cell comprising the recombinant vector of claim 13.

The application's sequence listing, which the Patent Office published only in electronic form, follows.

SEQUENCE LISTING (396 sequences)

SEQ ID NO: 1 - DNA, 733 bp, Homo sapiens
gggatccggagcccaaatcttctgacaaaactcacacatgcccaccgtgcccagcacctgaattcgagggtgcaccgtcagtcttcctcttccccccaaaacccaaggacaccctcatgatctcccggactcctgaggtcacatgcgtggtggtggacgtaagccacgaagaccctgaggtcaagttcaactggtacgtggacggcgtggaggtgcataatgccaagacaaagccgcgggaggagcagtacaacagcacgtaccgtgtggtcagcgtcctcaccgtcctgcaccaggactggctgaatggcaaggagtacaagtgcaaggtctccaacaaagccctcccaacccccatcgagaaaaccatctccaaagccaaagggcagccccgagaaccacaggtgtacaccctgcccccatcccgggatgagctgaccaagaaccaggtcagcctgacctgcctggtcaaaggcttctatccaagcgacatcgccgtggagtgggagagcaatgggcagccggagaacaactacaagaccacgcctcccgtgctggactccgacggctccttcttcctctacagcaagctcaccgtggacaagagcaggtggcagcaggggaacgtcttctcatgctccgtgatgcatgaggctctgcacaaccactacacgcagaagagcctctccctgtctccgggtaaatgagtgcgacggccgcgactctagaggat

SEQ ID NO: 2 - protein, 5 aa, Homo sapiens
  Site (3): Xaa equals any of the twenty naturally ocurring L-amino acids
WSXWS

SEQ ID NO: 3 - DNA, 86 bp, Artificial Sequence
  Primer_Bind: Synthetic sequence with 4 tandem copies of the GAS binding site found in the IRF1 promoter (Rothman et al., Immunity 1:457-468 (1994)), 18 nucleotides complementary to the SV40 early promoter, and a Xho I restriction site.
gcgcctcgagatttccccgaaatctagatttccccgaaatgatttccccgaaatgatttccccgaaatatctgccatctcaattag

SEQ ID NO: 4 - DNA, 27 bp, Artificial Sequence
  Primer_Bind: Synthetic sequence complementary to the SV40 promoter; includes a Hind III restriction site.
gcggcaagctttttgcaaagcctaggc

SEQ ID NO: 5 - DNA, 271 bp, Artificial Sequence
  Protein_Bind: Synthetic promoter for use in biological assays; includes GAS binding sites found in the IRF1 promoter (Rothman et al., Immunity 1:457-468 (1994)).
ctcgagatttccccgaaatctagatttccccgaaatgatttccccgaaatgatttccccgaaatatctgccatctcaattagtcagcaaccatagtcccgcccctaactccgcccatcccgcccctaactccgcccagttccgcccattctccgccccatggctgactaattttttttatttatgcagaggccgaggccgcctcggcctctgagctattccagaagtagtgaggaggcttttttggaggcctaggcttttgcaaaaagctt

SEQ ID NO: 6 - DNA, 32 bp, Artificial Sequence
  Primer_Bind: Synthetic primer complementary to human genomic EGR-1 promoter sequence (Sakamoto et al., Oncogene 6:867-871 (1991)); includes a Xho I restriction site.
gcgctcgagggatgacagcgatagaaccccgg

SEQ ID NO: 7 - DNA, 31 bp, Artificial Sequence
  Primer_Bind: Synthetic primer complementary to human genomic EGR-1 promoter sequence (Sakamoto et al., Oncogene 6:867-871 (1991)); includes a Hind III restriction site.
gcgaagcttcgcgactccccggatccgcctc

SEQ ID NO: 8 - DNA, 12 bp, Homo sapiens
ggggactttccc

SEQ ID NO: 9 - DNA, 73 bp, Artificial Sequence
  Primer_Bind: Synthetic primer with 4 tandem copies of the NF-KB binding site (GGGGACTTTCCC), 18 nucleotides complementary to the 5' end of the SV40 early promoter sequence, and a XhoI restriction site.
gcggcctcgaggggactttcccggggactttccggggactttccgggactttccatcctgccatctcaattag

SEQ ID NO: 10 - DNA, 256 bp, Artificial Sequence
  Protein_Bind: Synthetic promoter for use in biological assays; includes NF-KB binding sites.
ctcgaggggactttcccggggactttccggggactttccgggactttccatctgccatctcaattagtcagcaaccatagtcccgcccctaactccgcccatcccgcccctaactccgcccagttccgcccattctccgccccatggctgactaattttttttatttatgcagaggccgaggccgcctcggcctctgagctattccagaagtagtgaggaggcttttttggaggcctaggcttttgcaaaaagctt

SEQ ID NO: 11 - DNA, 1893 bp, Homo sapiens
caccaccccctgtcccctggattaatgcagttgcctccaactggtctccctgcttctgatcttactccttacagatgattcccgccatggcagctcttttggaatgcaccttaggttatgccacttctctgctcagcaccctttaggggctttgccccggctcccatttctcgctgccttgttggccctagtgacactggcttacttcaggctcatctcctctcagggcctgtgcactttctccctctgcttggaatgccctttccctgatgtctgcctggcttatgccacctgtacttccttcaggcacaagaggggcccccataatccagagcagcccttcccaactcctccctaccacctgctatgaagcccacccaatgctctgtgttcacggattcatttttattgtctgtctccccactagggagtaattgctctgagggcaggtacttccacaagtgtttggtgaaggaatgagtgaatggcacagggcgggagcacagtgaatgttttttgttcaaataggaagcaatgataccaaataaaaaccaggtagcattgtctcagcagctgcaggaacagtgctatgtgctgaagaagaattggggatcttgaggcctaggcacactctttcagtcttctgatggccattgtggcttttgagggggcagcttckgtgkgtgatggggacaaaacccacagtgcaaggctctggggagtgagtatgaggaaagagcaaacgtgggtgacgctgtcagggagtgaaaggatggaatgaggtgaggcgctagtttgagtagtttgaggccaaagcagggtggaaggacggcggtggtggtttttataggatcaaacagattttgacaaaatgaaacaaaagctatctgacaaaagggtagattgaataaatatgctggatatgtacacaggttaaagtgtttccatcacatgcagccagttcctgcttagttccatgtgagttaggcactgtgagggacggtcggtggcagagttttaattccaggcgagtacagcagccgggctgcttcctctattgctcaactgatgtgtgttcagaggatccaaactcatttcactgtcattctaaggaaaacatcatggacaatgtaaattttattctctttctaccctgtttwaaaaaactaaaaaaaaaacctaaaaaaaaaaaaaagtcctccaaaacactgcacaattcaccccaaagccaaaccgagttttaggattgcttaataatgtcttatctttatctcttcttaaaagaaacttcagaatggttcacggtgaaactttctcaaatacagcccctgatcgaggttaagatcagtttggtctggcatcaagtctgaattatagaacactaaggaagaaaaacattcacgtctatggtgacattttttatccgcagggctgggggtggccatgccttagggatgcctgtgaatgcactaacaacaaataaagggaatcttttctgttttttccttttattcccggcaagctgtgagataagagcactctctgaacttttgccggggccagcgtggtgctgggaattttcgtgcctgttacgccacttctgtcatccatctgacatcaggcccgagtattagtattatcaaacccatttttgcaagtgaagcaccggaaagctaaggagggtttgcccgttgctcaagcccactagggtgctgtggtgtgggcagagtccgttgaaaacatgtctggccaggcgcggtagctcacgcctgtaatcccagcactttgggaggctgagaagggcggatcacttgaggtcgggagtttgagaccagcctggccaacatggtaaacctcgtctctattaaaaatacaaaataaggccgggcgcgg

SEQ ID NO: 12 - DNA, 993 bp, Homo sapiens
tagcaaaagaactgaggaagctctttccactacggctgtattgcactgactcaaatctgaggccagagaagtgtcgtcgctttgtccatccccagtggcagcttcttcacctgaatgggactatccacagcacaagtgaggcagacacagaaccctgtgtggatggctgggtatatgatcaaagctacttcccttcgaccattgtgactaagtgggacctggtatgtgattatcagtcactgaaatcagtggytcaattcctacttctgactggaatgctggtgggaggcatcataggtggccatgtctcagacaggtttgggcgaagatttattctcagatggtgtttgctccagcttgccattactgacacctgcgctgccttcgctcccaccttccctgtttactgtgtactacgcttcttggcaggtttttcttccatgatcattatatcaaataattctttgcccattactgagtggataaggcccaactctaaagccctggtagtaatattgtcatctggtgcccttagtattggacagataatcctgggaggcttggcttatgtcttccgagactggcaaaccctgcacgtggtggcgtctgtacctttctttgtcttctttcttctttcaaggtggctggtggaatctgctcggtggttgataatcaccaataaactagatgagggcttaaaggcacttagaaaagttgcacgcacaaatggaataaagaatgctgaagaaaccctgaacatagaggttgtaagatccaccatgcaggaggagctggatgcagcacagaccaaaactactgtgtgtgacttgttccgcaaccccagtatgcgtaaaaggatctgtatcctggtatttttgagaaaaaaaaatctcaaggaaaaggcataaaaatgattgctacacaaaagtgaccaaattttaagaagccttcatgagctgattggtggggaaattcagaaaaaaaaaaaaaaag

SEQ ID NO: 13 - DNA, 643 bp, Homo sapiens
  misc_feature (602)..(602): n equals a,t,g, or c
agctgggagacaggcctccctctggagttcatagctgagttgctgtccaaatcagtggtccctagaatctataaaacaaaactgagaacttcagaggtgcatccagagaagccacactccaaaaggaccacttccagacgccatgcggcaaaccctaccgctgctgctgctgacggtgctgcgccccagctgggcagaccctccccaggagaaggtcccgctcttccgggtcactcagcagggcccctgggggagcagtggcagcaacgccaccgactcgccctgcgaggggctgcccgccgcggatgcgacggccttgaccctggcgaaccgcaacctggagcgcctgcccggctgcctaccgcgcacactgcgcagcctcgacgccagccacaacctgctgcgcgccctgagcacttccgagctcggccacctggagcagctgcaggtgctgaccctgcgccacaaccgcatcgccgcgctgcgctggggcccgggtgggccggcggggctgcacaccctggacctcagctacaaccagctggccgctctgccgccgtgcgccgggcccgcgctgagcagcttccgcgccctggcgctcngccggaatccgctgcgggcgctgcagccccgggccttcgcc

SEQ ID NO: 14 - DNA, 1205 bp, Homo sapiens
cggacgcgtgggcggctgtgtgtcgccggagccgaagcgcgcaggcccgtcccggtggccggggagcgggcgggtgggggcgccatgtggttcatgtacctgctgagctggctgtcgctcttcatccaggtggccttcatcacgctggctgtcgcggctggactctattacctggcagaactgatagaagaatacacagtggccaccagcaggatcataaaatacatgatctggttctccaccgctgtactgattggcctctacgtctttgagcgcttccccaccagcatgattggagtgggcctattcaccaacctcgtctactttggcctcctccagaccttccccttcatcatgctgacctcgcctaacttcatcctgtcgtgtggactagtggtggtgaatcattacctagcatttcagttttttgcagaagaatattatcccttctcagaggtcctggcctatttcactttctgcctgtggataattccgtttgcgttttttgtgtcactttcggccggggagaacgtcctgccctctaccatgcagccaggagatgatgtcgtctccaattatttcaccaaaggcaagcggggcaaacgcttagggatcctggttgtcttctccttcatcaaagaggccattctacccagtcgtcagaagatatactgacccccatgcaggcaggatgtggggggcaagatcaggagagtcaggcccctgggcctctatgccaggtggggaccagaagtcgggaaggcacctaccacctgccctggctttcttcccctcaactctggagccccatccccaccctccttggggggctcagcttggctcagatctgatgcttcaagaggctgtaacctcagagggcaccaaggagggtggcagagcctgcttagccaggaggccgaggtccctcagtcctcccctgtcccttccaaggtgggtcaggaggttctggccccgctggggcaggcagggcagggtctgtgaagcttaagagcagatggtgacaagttctctgggcaggtggccatggggaggggccatggcttggcatgtccaacagaaatagtttttgctgttgaacggtgatttctgtccaagtgcagatttccgtttgaataaagcttcgcttytaggtggccaaaaaaaaaaaaaaaaaaaaaaaaaaaaaaaaaaaaaaaaaaaaaaag

SEQ ID NO: 15 - DNA, 537 bp, Homo sapiens
tctgaattttaaaaagattccagatgatttacatgcacagctaagtttgaaaagtgtgagacaagaaggccttgcctgcacgatctcactatgtcttgcttttgtgacatcatctccttccattctctctcttggtcgctggttttattgcttcttctcaaaccaccaactttatccacttcaggatctttatacaaattcagtctacttgcaacatttccccctcagatctttcatattatcaacgtctctgtttatatgttacctcctgagagaggccttcactggcttttttttttcaacagtacatccacccagatttgctcagtccaccctctgcagtagctgttacaattatgtgaaattatgttatttatttggatacttgctttctatcctaccccaactccgcagaaaataaacactctgaggccaaaaaaaaaaaaaaaaaaaaaaaaaaaaamamaaaaaaaaaaaaaaaggggggggggcccgacaaaaggaaccccctttttcccggggggccccaaaattttt

SEQ ID NO: 16 - DNA, 2826 bp, Homo sapiens
  misc_feature (2817)..(2817): n equals a,t,g, or c
cagtcttccagggcggcggtgggtgtccgcttctctctgctcttcgactgcaccgcactcgcgcgtgaccctgactccccctagtcagctcagcggtgctgccatggcgtggcggcggcgcgaagccagcgtcggggctcgcggcgtgttggctctggcgttgctcgccctggccctgtgcgtgcccggggcccggggccgggctctcgagtggttctcggccgtggtaaacatcgagtacgtggacccgcagaccaacctgacggtgtggagcgtctcggagagtggccgcttcggcgacagctcgcccaaggagggcgcgcatggcctggtgggcgtcccgtgggcgcccggcggagacctcgagggctgcgcgcccgacacgcgcttcttcgtgcccgagcccggcggccgaggggccgcgccctgggtcgccctggtggctcgtgggggctgcaccttcaaggacaaggtgctggtggcggcgcggaggaacgcctcggccgtcgtcctctacaatgaggagcgctacgggaacatcaccttgcccatgtctcacgcgggaacaggaaatatagtggtcattatgattagctatccaaaaggaagagaaattttggagctggtgcaaaaaggaattccagtaacgatgaccataggggttggcacccggcatgtacaggagttcatcagcggtcagtctgtggtgtttgtggccattgccttcatcaccatgatgattatctcgttagcctggctaatattttactatatacagcgtttcctatatactggctctcagattggaagtcagagccatagaaaagaaactaagaaagttattggccagcttctacttcatactgtaaagcatggagaaaagggaattgatgttgatgctgaaaattgtgcagtgtgtattgaaaatttcaaagtaaaggatattattagaattctgccatgcaagcatatttttcatagaatatgcattgacccatggcttttggatcaccgaacatgtccaatgtgtaaacttgatgtcatcaaagccctaggatattggggagagcctggggatgtacaggagatgcctgctccagaatctcctcctggaagggatccagctgcaaatttgagtctagctttaccagatgatgacggaagtgatgagagcagtccaccatcagcctcccctgctgaatctgagccacagtgtgatcccagctttaaaggagatgcaggagaaaatacggcattgctagaagccggcaggagtgactctcggcatggaggacccatctcctagcacacgtgcccactgaagtggcaccaacagaagtttggcttgaactaaaggacattttattttttttactttagcacataatttgtatatttgaaaataatgtatattattttacctattagattctgatttgatatacaaaggactaagatattttcttcttgaagagacttttcgattagtcctcatatatttatctactaaaatagagtgtttaccatgaacagtgtgttgcttcagactattacaaagacaactggggcaggtactctaatataaaggacaggtggtgtttctaaataattggctgctatggttctgtaaaaaccagttaattctatttttcaaggtttttggcaaagcacatcaatgttagactagttgaagtggaattgtataattcaattcgataattgatctcatgggctttccctggaggaaaggttttttttgttgttttttttttaagaacttgaaacttgtaaactgagatgtctgtagcttttttgcccatctgtagtgtatgtgaagatttcaaaacctgagagcactttttctttgtttagaattatgagaaaggcactagatgactttaggatttgcatttttccctttattgcctcatttcttgtgacgccttgttggggagggaaatctgtttattttttcctacaaataaaaagctaagattctatatcgcacatgagcattaagttcttcattgccttgttaaggaaaatgagtaggcagactcagaatctgttatattgatttcagttacaatttaatctttacaattaaaagggcgaaagatgtagaattttagtttttgttgttgactcgaaataaccagttttcttgattagagtttaagcagatttaataccatgaccttgcttaaccgtttcttcttttttacttgcttgctgttcttttgggtcaaaggagcaggctaatgcaaagcttttggagactgctaagtgttaaaaagtgattaaacacacactctgctattttttcacttcttggaggtagaagtcgagtatgaggcagttattttttagagtgtggaattatagtctttccttgctcctagttattctgtatatctttactttgtaggtaaaaataaatgtttatttaamacaatttttaaaattataaatttatttttatagccatatgtaggatataaagatttatatagattattttctcaagctacttaatgctttaattctagctactcatcatgaaatagtaaacagttttactgaaataaactctacagacagatgcagtatgaggagctattgaagtagaaaatgtatttcgctttgcacactgagttggttttagcagacaacctcaagtaggtttccataacagccattacctttgaaatctaccttctgtagtttattataaataggaaaatacatcctgattctgtagcaagtagattgtttgctctttgtctttaagaaatactasgagggccgggcgcggtnggggggccc

SEQ ID NO: 17 - DNA, 1508 bp, Homo sapiens
cacgcgtccgattctggcttctggcctgtcattccactgagctcactgatgacctacatgttgtgaaatccaggagacatttttaggttctcgtattaacctctcagcagcatttgcctctgctgtccatgacctcctttttgaaaccatctcctcccatggcctccatgtccagtcctctctgggtttgcttgttcacctccggctgctccctctctgtctcctccatgggttcatcttcctcttgcagccacactaaccatcttgcagcctctaggacataccatggcctttgccacatgctgttccctctgtttagaatggtctcttctccctccctttgcctagctaactcttcctcatccttcagttctccattgattctcaatgtcttcagggaagcctcccttgacctccttgtgagatcgcatttccttgttatatactccttcatagctcttagcctaggtgcaacttcaccttctctagtgtggctccttgagtaaggcatctcttccctcagacagtaaacactatgaagagaggggccagtgtatttttgctctttattgtattccaaaacgcacataataagtgctcaataattatttcgtgaatgagtaaatggatcaatgtgtaattatacagtgatctacttgcttacttgtttattatctgtcattctccatgacagcaggaaacaaaacggtttagtacatacagttcctaacacatcgcacatggcacacagcaggaaacattttaattttttgaatatatgaataaggaggattccaaaggagacattctagtagttctactcatagtatgtcagtgttttgaggtttttatttttacttttttactgtcttttgatatagtttctggttacagtagagcatcaaatacctttattgcctgtagagaagagttatttggaaaatgttaccaaatagcttgttctcacaatatgttatgtataaaatagactgtctatgaagatcttgaatctatacacttctccctctcttcattgccaccaccttacttgaaattacgatcatatttcccctggactacattgaaccacacacctttccttaagtatgatttattaaactatatataaacttggatggctgagtttttactgatcttaaagccaagaatcatatctaattatattatccccaaagaaaactaggcacatataggtgcataaatagttttttattttgttgtggcagattatttccattctgcacttgacaaagtatttagttcagttaaagaaaataagtatttttaaactagcaacaaatttttattttcaaatgaccaaactgaaaatattcagttaaggtaaaacatcagtcgccaggtgtggtggctaatgcctataatcccagcactttgggagggtgagtgggaggatcgtttgagaccaggagttcaagaccagcctgggcaatatagtgagaccctgtctctacaaaaaaaaaaaaaaa

SEQ ID NO: 18 - DNA, 1631 bp, Homo sapiens
gaattcccgggtcgacccacgcgtccgcccgcacgcccgggcgcacgccctccccgcccgggccgccctctggctccccgcgcccggcagccagtgcctcaccgcgccgtcccgcgccagggctcgctccgagagccgcttccttctcgccgcggccggcgcgggccccccggccatgcgcccccgagccccagcctgcgccgccgcggcgctcgggctctgcagccttctgctgctgctcgcgcccgggcacgcgtgccccgcgggctgcgcctgcaccgacccgcacaccgtggactgccgcgaccgcgggctgcccagcgtgccagaccctttccccctggacgtgcgcaagctgctggtggccggcaaccgcatccagcggatccccgaggacttcttcatcttctacggcgacctggtctacctggacttcaggaacaactcgctgcgctcgctggaggagggcacgttcagcggctcggccaagctcgtgttcctcgacctcagctacaacaacttgacccagctgggcgccggcgccttccgctcggccgggaggctggtgaagcttagcctggctaacaacaacgtggtgggcgtgcacgaggacgccttcgagaccctggagtcgctgcaggtgctggagctcaacgacaacaacctgcgcagcctcagcgtggccgccctggccgcgctgcccgcgctgcgctccctgcgtctggacgggaacccctggctgtgcgactgtgacttcgcccacctcttctcctggatccaggagaacgcatccaaactgcccaaaggccttgatgaaatccagtgctccctgcccatggagagcaggaggatatccctgcgtgagctgtcggaggccagcttcagcgagtgtaggttcagcctgtcactcacagacctctgcatcatcattttctccggtgtggccgtgtccattgcggccatcatctccagcttcttcctggccactgtggtgcagtgcctccagaggtgcgcacccaacaaagatgcggaggatgaagacgaggacgaggatgactgagccacctcctccctcctgcctcttactctccagcaccgaaccagaagctctctccaagacgagagggaaatgctgaaaatggaaaagcattggccaccatctgtgaactgaacagagcctgttccgtgtcttggcccctgggtacacctgctgggaccactgatctcagagtttagaatcagcagagcacagaagcccaggaaggatggagggaattattcctggagcataacctgcctctcagatcgaggtgtgtgttgggggagaagatgaccgagtcaggcttcatagctgatgactaaaagcctcccccaggaaatgtgaagactggcagctttcaatggcaaagatgattttacgccattctttttctgacctgtactgggagatcatgaaacatctgccttcctcccaagaaacagcagctcaaacagtggagattcaaattcggatcattcaccacaagaacgagaactttgatccttatataataggcctcagcaaccttgggatgttatactgggaactaataaactcgtgtgcaatagactcaaaaaaaaaaaaaaaaaaa

SEQ ID NO: 19 - DNA, 1881 bp, Homo sapiens
gaattcggcacgaggtgccccccactctcgctccattcggcgggagcacccagtcctgtacgccaaggaactggtcctgggggcaccatggtttcggcggcagcccccagcctcctcatccttctgttgctgctcctggggtctgtgcctgctaccgacgcccgctctgtgcccctgaaggccacgttcctggaggatgtggcgggtagtggggaggccgagggctcgtcggcctcctccccgagcctcccgccaccctggaccccggccctcagccccacatcgatggggccccagcccacaaccctggggggcccatcaccccccaccaacttcctggatgggatagtggacttcttccgccagtacgtgatgctgattgctgtggtgggctccctggcctttctgctgatgttcatcgtctgtgccgcggtcatcacccggcagaagcagaaggcctcggcctattacccatcgtccttccccaagaagaagtacgtggaccagagtgaccgggccgggggcccccgggccttcagcgaggtccccgacagagcccccgacagcaggcccgaggaagccctggattcctcccggcagctccaggccgacatcttggccgccacccagaacctcaagtcccccaccagggctgcactgggcggtggggacggagccaggatggtggagggcaggggcgcagaggaagaggagaagggcagccaggagggggaccaggaagtccagggacatggggtcccagtggagacaccagaggcgcaggaggagccgtgctcaggggtccttgagggggctgtggtggccggtgagggccaaggggagctggaagggtctctcttgttagcccaggaagcccagggaccagtgggtccccccgaaagcccctgtgcttgcagcagtgtccaccccagtgtctaacagtcctcccgggctgccagccctgactgtcgggcccccaagtggtcacctccccgtgtatgaaaaggccttcagccctgactgcttcctgacactccctccttggccgccctgtggtgccaatcccagcatgtgctgattctacagcaggcagaattgctggtccccggtgccccggaggaatcttaccaagtgccatcatccttcacctcagcagccccaaagggctacatcctacagcacagctcccctgacaaagtgagggagggcacgtgtccctgtgacagccaggataaaacatccccaaagtgctgggattacaggcgtgagccaccgtgcccggcccaaactactttttaaaacagctacagggtaaaatcctgcagcacccactctggaaaatactgctcttaattttcctgaaggtggccccctgtttctagttggtccaggattagggatgtggggtatagggcatttaaatcctctcaagcgctctccaagcacccccggcctgggggtgagtttctcatcccgctactgctgctgggatcagggtgaatgaatggaactcttcctgtctggcctccaaagcagcctagaagctgaggggctgtgtttgaggggacctccaccctggggaagtccgaggggctggggaagggtttctgacgcccagcctggagcaggggggccctggccaccccctgttgctcacacattgtctggcagcctgtgtccacaatattcgtcagtcctcgacagggagcctgggctccgtcctgctttagggaggctctggcaggaggtcctctcccccatccctccatctggggctcccccaacctctgcacagctttccaggtgctgagatataatgcaccagcacaataaacctttattccggcaaaaaaaaaaaaaaaaaaaaaaaaaaaaaaaaaa

SEQ ID NO: 20 - DNA, 2220 bp, Homo sapiens
cgatgagctcttaggccagtgtggggaccggggctgaggtgccctggacactggaggagggggagggaaggagcccctgggagcctggggtagaagtgtaggaggtgggaggattccggcccgcatggagctgtcctggcctcagaaggttatccgtctctcctgccaaccatggagacatatttagacaggaccaggtggggactgaggggtgccaatttcagggggcagctccggttccctccccgccccctgctcctattcctccacctgaccctttttcccttggctctgtcggcagtttctccaggacccagcagtgccctctgtccactgctctgggccattccccaatcccccctcccacttgagcccctaactcagaatctgggacccaggggcccctccctaccccagctaacctcttctggaccaggagagccaacccagatcccactacctccatgagtgctacagacaggatggggcccagagctgtgccgggtctgcggctggcactgctgttgctgctggtgctagggacacccaagtcaggggtacaggggcaggaagggctggacttccctgagtacgatggtgtggaccgtgtgatcaatgtcaatgcaaagaactacaagaatgtgttcaagaagtatgaggtgctggcactcctctaccatgaaccccccgaggatgacaaggcctcacaaagacaatttgagatggaggagctgatcctggagttagcagcccaagtcctagaagacaagggtgttggcttcgggctggtagactctgagaaggatgcagctgtggccaagaaactaggcctaactgaagtggacagcatgtatgtattcaagggagatgaagtcattgagtacgatggcgagttttctgctgacaccatcgtggagtttctgcttgatgtcctagaggaccctgtggaattgattgaaggtgaacgagagctgcaggcgtttgagaatattgaggatgagatcaaactcattggctacttcaagagcaaagactcagagcattacaaagccttcgaggatgcagctgaggagtttcatccctacatccccttcttcgccaccttcgacagcaaggtggcaaagaagctgaccctgaagctgaatgagattgatttctacgaggccttcatggaagagcctgtgaccatcccagacaagcccaatagcgaagaggagattgtcaacttcgtggaggagcacaggagatcaaccctgaggaaactgaagccggagagtatgtatgagacctgggaggatgatatggatggaatccacattgtggccttcgcagaggaagctgatcctgatggtttcgagttcttagagactctcaaggctgtggcccaagataacactgaaaacccagatcttagcatcatctggattgaccctgatgacttccccctgctggtcccatactgggagaagacgtttgacatcgacttgtcagccccacaaataggagtcgtcaatgttactgatgcggatagcgtatggatggaaatggacgatgaggaggacctgccttctgctgaggagctggaggactggctggaggatgtcctggagggcgagatcaacacagaggacgatgacgatgatgatgatgactagttgctatggcaaccatctttcagccccactggtcttttcatgctctctcctgccttcccttgtccttccctgagttcctccagggagactaggttattctctgccatagagctaactggggtctatatgctgggtgctgagacactgatccccctcatttgatgagcaaatgagctacttttccctagacaccaggccagctctctcttatctgacttctgtttcttatcccataacttacttgtatctattatgtgtctcttccatcactctccatactctttcttgtgattctcctctagccatatatatgggccccatctctgttctgttccctccatctatgcacagctttcccccactctctctaatcctgtatctttctgactgtcctgtccttggccagaaggaagggagaatactgtgtttgggactgtatctcagcaatcacttgttaatgtatttgggtcaaatgagaggcctcaataaagacatctggggcagcatgaaaaaaaaaaaaaaaaaaaaaaaaaaaaaaaaaaaaaaaaaaaaaaaaaactcgtag

SEQ ID NO: 21 - DNA, 2559 bp, Homo sapiens
ggcacgagccattgcagactctagtgcagtggttcaatctcggctcactgcaacctccgcctccccgattcaagcgattctcctgcgtcagcctccccagtagctgagactacaggatgcagaaagcctcagtgttgctcttcctggcctgggtctgcttcctcttctacgctggcattgccctcttcaccagtggcttcctgctcacccgtttggagctcaccaaccatagcagctgccaagagcccccaggccctgggtccctgccatgggggagccaagggaaacctggggcctgctggatggcttcccgattttcgcgggttgtgttggtgctgatagatgctctgcgatttgacttcgcccagccccagcattcacacgtgcctagagagcctcctgtctccctacccttcctgggcaaactaagctccttgcagaggatcctggagattcagccccaccatgcccggctctaccgatctcaggttgaccctcctaccaccaccatgcagcgcctcaaggccctcaccactggctcactgcctacctttattgatgctggtagtaacttcgccagccacgccatagtggaagacaatctcattaagcagctcaccagtgcaggaaggcgtgtagtcttcatgggagatgatacctggaaagaccttttccctggtgctttctccaaagctttcttcttcccatccttcaatgtcagagacctagacacagtggacaatggcatcctggaacacctctaccccaccatggacagtggtgaatgggacgtgctgattgctcacttcctgggtgtggaccactgtggccacaagcatggccctcaccaccctgaaatggccaagaaacttagccagatggaccaggtgatccagggacttgtggagcgtctggagaatgacacactgctggtagtggctggggaccatgggatgaccacaaatggagaccatggaggggacagtgagctggaggtctcagctgctctctttctgtatagccccacagcagtcttccccagcaccccaccagaggagccagaggtgattcctcaagttagccttgtgcccacgctggccctgctgctgggcctgcccatcccatttgggaatatcggggaagtgatggctgagctattctcagggggtgaggactcccagccccactcctctgctttagcccaagcctcagctctccatctcaatgctcagcaggtgtcccgatttcttcatacctactcagctgctactcaggaccttcaagctaaggagcttcatcagctgcagaacctcttctccaaggcctctgctgactaccagtggcttctccagagccccaagggggctgaggcgacactgccgactgtgattgctgagctgcagcagttcctgcggggagctcgggccatgtgcatcgagtcttgggctcgtttctctctgagcttccttctcctacatctgcttgctgctgggatacccgtcaccacccctggtccttttactgtgccatggcaggcagtctcggcttgggccctcatggccacacagaccttctactccacaggccaccagcctgtctttccagccatccattggcatgcagccttcgtgggattcccagagggtcatggctcctgtacttggctgcctgctttgctagtgggagccaacacctttgcctcccacctcctctttgcagtaggttgcccactgctcctgctctggcctttcctgtgtgagagtcaagggctgcggaagagacagcagcccccagggaatgaagctgatgccagagtcagacccgaggaggaagaggagccactgatggagatgcggctccgggatgcgcctcagcacttctatgcagcactgctgcagctgggcctcaagtacctctttatccttggtattcagattctggcctgtgccttggcagcctccatccttcgcaggcatctcatggtctggaaagtgtttgcccctaagttcatatttgaggctgtgggcttcattgtgagcagcgtgggacttctcctgggcatagctttggtgatgagagtggatggtgctgtgagctcctggttcaggcagctatttctggcccagcagaggtagcctagtctgtgattactggcacttggctacagagagtgctggagaacagtgtagcctggcctgtacaggtactggatgatctgcaagacaggctcagccatactcttactatcatgcagccaggggccgctgacatctaggacttcattattctataattcaggaccacagtggagtatgatccctaactcctgatttggatgcatctgagggacaaggggggcggtctccgaagtggaataaaataggccgggcgtggtgacttgcacctataatcccagcactttgggaggcagaggtgggaggattgcttggtcccaggagttcaagaccagcctgtggaacataacaagaccccgtctctactatttaaaaaaaagtgtaataaaatgataatataattaaaaaaaaaaaaaaaaaaaaa

SEQ ID NO: 22 - DNA, 1994 bp, Homo sapiens
ccacgcgtccgcctgagtgggtgcgccgagtcatggagggcgcagagctggccgggaagatcctttccacctggctgacgctggttctcggcttcatccttttaccttcggtcttcggagtgtctctgggcatctccgagatctacatgaagatcctagtgaaaactttagagtgggccacaatacgaattgaaaaaggaaccccaaaggagtcgattcttaaaaactctgcttctgttggtattatccaaagagatgagtcacccatggaaaaagggctctctggtctacgaggaagggactttgagctgtctgacgtgttttatttctccaagaagggattggaagccattgtagaagatgaagtgacccagaggttttcctcagaggagctagtgtcatggaatctcctcacaagaaccaatgtaaatttccagtacatcagtctgcggctcactatggtgtgggtgctgggcgtcatagtgcgctattgtgtcctactgcctctgaggtaagtcatatgcctggtaatttgatgatacgcttgactcagctttctttttgaatcatgtacataatggccacgtaagtgttctgtggtgcttattccacccattcccacgtaggaaatgccaccaaacatgacctctaaaggaatgtattacgtatccattttcctttcacaatttttccccaaatgaagttgtatattcagaatccaatgtatatcttagaatctggatccactttgctattagagtctgagctaacttgaggatggagagaaaagggaagtgaagaagaagaagaggaagaggaagaagaagaagagagatcatcaacagtttcatattcactagagcatcagccaaactgtaagagctgaccagaacccactgcctttctttgccagtccatagcacttcataactgcataagagagaaaaaattcttgagtgtggttacacgtgggagagagccatttcgaagtgtgtttgttccatccaattcattgtgatcacggactgctcttattaaagtgtccccacctgggtccccttctgcttctgagcttgagtgccacctggtgaggaggcagtgtcaagcctagtttatggaaagcacgatgtggaacatgagtagaaggcactgcgtggtgggatgaagctgtaagtggctgagatctgattagcgtggtggtagcagtagtaggcacgtataccagccacaacattattgttgatcatcttgcttcatttccctggacatggccttggcatcctctcagcagagctttccaggcagtggctacctgccaactaaacttggcacatgaattgaaatctttttaccacccccagggtggcctatgcttgcctcattcagatttattaccagggaaagtattgcttaactacagggaaatgcagatttctaagaaattatttctgggttgttgttgttgtttttttttgcccatattgctagttcagacattggggcatagtatgtcttttgggaatcatttcagctgtgataatgaagcgaaattcaaggtttcacatataattttgcttgaaccttaaactagtgcccccaaaacagggttcgtgtactctgggagtgtacaagactatccattggcatgcaggaaggaaatattagagctcttatttactaaaagcttctgttctggctgggtgcagtggctcacgcctgtaatcccagcactttgggaggccgaggtgggcggatcacaagatcaagagatcgagaccatcctggccaacatggtgaaacctcatctctactaaaaatacaaaaattaactgggcgtggtggagcacacctagtctcagctactcgggaggctgagacaggagaatcgcttgaacctgggaggcagaggttgcagtgagctgtgatcgtgccactgcactctagcctggcaacagagcgagactgcgtatccaaaaaaaaaaaaaaaaaaaaaa

SEQ ID NO: 23 - DNA, 2208 bp, Homo sapiens
cggacgcgtgggttctaatctcactacaatatgtaacattggtgttcgatctcaagtatttctgaatatattcccctatccacagaaatatactctgggggaaaaaaaatagaacaaattcttgccgtcctgaccattgaacaagagactaattagacaatggggctagaaaaacctcaaagtaaactggaaggaggcatgcatccccagctgataccttcggttattgctgtagttttcatcttacttctcagtgtctgttttattgcaagttgtttggtgactcatcacaacttttcacgctgtaagagaggcacaggagtgcacaagttagagcaccatgcaaagctcaaatgcatcaaagagaaatcagaactgaaaagtgctgaagggagcacctggaactgttgtcctattgactggagagccttccagtccaactgctattttcctcttactgacaacaagacgtgggctgagagtgaaaggaactgttcagggatgggggcccatctgatgaccatcagcacggaagctgagcagaactttattattcagtttctggatagacggctttcctatttccttggacttagagatgagaatgccaaaggtcagtggcgttgggtggaccagacgccatttaacccacgcagagtattctggcataagaatgaacccgacaactctcagggagaaaactgtgttgttcttgtttataaccaagataaatgggcctggaatgatgttccttgtaactttgaagcaagtaggatttgtaaaatacctggaacaacattgaactagaaactcagaaagtggtccttgtgatggaaagagaaaagaaaaaccaattagaataaggcagaatgtacgtgcgtcattggaacacagaaaacatgctggttcatacagcgtttttagtcataatggtcttttttattttgtttgattcattcgagacaacatgtgtgtatgtgtgtgtgtgtgtgtgtagataatgtggtttttgtatggtgtttgatggaaggaataatctttctttgctttcttagtagtatttcaaggtgtttacttttcaattggtgtgcactgaatgcatgtatggaagaatagcgtgaataatgcaatctcttkgtcatttttccccttytcagaytcttagytcttaaaattcaaagrtgggatattctaactggtagtggtgcatcatttttaacccaaatattgcaagcactttaaagatttgaaaccacatttttattgtttgatgtttcattttcagactttttaatgtcagtcattacaattacattgcatgaggaaaatttttccagaacaacagtgtggaatagttctgaattatgctgttctacagatagraaaaaagtccaaatgcctttaaaaatttacttcttactccacccaacacgtttttgcaaagcaagaagtctttgtaagacaccttaaacaaagtccttcaattctacagcagaggaaataaaatcccccagaagccaaagggctcaccttcacattgttagttcatgacagacccaggtgtgcttcattagagataacatacattccctttggtatcacaggaagttactggggattactcgacctcattacttagctaacgactggataaaatttcttaattrtttgaagtaacattgtattcgtgtttgcattattaatttgaatagaaaataatcacattttcaacccatttatacaaattgttaatgtttctttagagctgtataactatagtttgaactagcaaggaagttattgttttgacaaccagaaattatgcttttctggtgcatgaaacactaattgcaaagggcagtcacatccaactttaataaaatatggtggtctttcttaaaattttcaatttgctaatttttcctggatctaagctgaaaaattccaagcaacagctttttaacctaactttcctactactacttttaaaagcagtatttattttgtaaattagctactgattttttgggtttgaaatactggtgtttgattgtgtggtggtggtggtggtgatggatgcgtgtagctgtgttaaaagctgatacttttagctgaaatggtgctaaataaatttgactgtgtttgccatattcactaaaaaaaaaaaaaaaaaactagagggggggcccggtacccaattcgccctaa

SEQ ID NO: 24 - DNA, 2244 bp, Homo sapiens
ggctgcgagtgtccagacatccttgtggaaccagcgttgtttttccttggcagctgcggagacccgtrataattcgttaactaattcaacaaacgggacccttctgtgtgccagaaaccgcaagcagttgctaacccagtgggacaggcggattggaagagcgggaaggtcctggcccagagcagtgtgacacttccctctgtgaccatgaaactctgggtgtctgcattgctgatggcctggtttggtgtcctgagctgtgtgcaggccgaattcttcacctctattgggcacatgactgacctgatttatgcagagaaagagctggtgcagtctctgaaagagtacatccttgtggaggaagccaagctttccaagattaagagctgggccaacaaaatggaagccttgactagcaagtcagctgctgatgctgagggctacctggctcaccctgtgaatgcctacaaactggtgaagcggctaaacacagactggcctgcgctggaggaccttgtcctgcaggactcagctgcaggttttatcgccaacctctctgtgcagcggcagttcttccccactgatgaggacgagataggagctgccaaagccctgatgagacttcaggacacatacaggctggacccaggcacaatttccagaggggaacttccaggaaccaagtaccaggcaatgctgagtgtggatgactgctttgggatgggccgctcggcctacaatgaaggggactattatcatacggtgttgtggatggagcaggtgctaaagcagcttgatgccggggaggaggccaccacaaccaagtcacaggtgctggactacctcagctatgctgtcttccagttgggtgatctgcaccgtgccctggagctcacccgccgcctgctctcccttgacccaagccacgaacgagctggagggaatctgcggtactttgagcagttattggaggaagagagagaaaaaacgttaacaaatcagacagaagctgagctagcaaccccagaaggcatctatgagaggcctgtggactacctgcctgagagggatgtttacgagagcctctgtcgtggggagggtgtcaaactgacaccccgtagacagaagaggcttttctgtaggtaccaccatggcaacagggccccacagctgctcattgcccccttcaaagaggaggacgagtgggacagcccgcacatcgtcaggtactacgatgtcatgtctgatgaggaaatcgagaggatcaaggagatcgcaaaacctaaacttgcacgagccaccgttcgtgatcccaagacaggagtcctcactgtcgccagctaccgggtttccaaaagctcctggctagaggaagatgatgaccctgttgtggcccgagtaaatcgtcggatgcagcatatcacagggttaacagtaaagactgcagaattgttacaggttgcaaattatggagtgggaggacagtatgaaccgcacttcgacttctctaggaatgatgagcgagatactttcaagcatttagggacggggaatcgtgtggctactttcttaaactacatgagtgatgtagaagctggtggtgccaccgtcttccctgatctgggggctgcaatttggcctaagaagggtacagctgtgttctggtacaacctcttgcggagcggggaaggtgactaccgaacaagacatgctgcctgccctgtgcttgtgggctgcaagtgggtctccaataagtggttccatgaacgaggacaggagttcttgagaccttgtggatcaacagaagttgactgacatccttttctgtccttccccttcctggtccttcagcccatgtcaacgtgacagacacctttgtatgttcctttgtatgttcctatcaggctgatttttggagaaatgaatgtttgtctggagcagagggagaccatactagggcgactcctgtgtgactgaagtcccagcccttccattcagcctgtgccatccctggccccaaggctaggatcaaagtggctgcagcagagttagctgtctagcgcctagcaaggtgcctttgtacctcaggtgttttaggtgtgagatgtttcagtgaaccaaagttctgataccttgtttacatgtttgtttttatggcatttctatctattgtggctttaccaaaaaataaaatgtccctaccagaagccttaaaaaaaaaaaaaaaaaaaaaaaagggcggcc

SEQ ID NO: 25 - DNA, 2138 bp, Homo sapiens
tcgacccacgcgtccgcaagaacatccgggagcagggccgcttcctgcaggacgtgttcaccacgctggtggacctcaagtggccacacacattgctcatcttcaccatgtccttcctgtgcagctggctgctcttcgccatggcctggtggctcatcgccttcgcccacggtgacctggcccccagcgagggcactgctgagccctgtgtcaccagcatccactccttctcgtctgccttccttttctccattgaggtccaagtgactattggctttggggggcgcatggtgactgaggagtgcccactggccatcctgatcctcatcgtgcagaacatcgtggggctcatgatcaacgccatcatgcttggctgcatcttcatgaagactgcccaagcccaccgcagggctgagaccctcatcttcagcaagcatgcggtgatcgctctgcgccacggccgcctctgcttcatgctacgtgtgggtgacctccgcaagagcatgatcatcagcgccaccatccacatgcaggtggtacgcaagaccaccagccccgagggcgaggtggtgcccctccaccaggtggacatccccatggagaacggcgtgggtggcaacagcatcttcctggtggccccgctgatcatctaccatgtcattgatgccaacagcccactctacgacctggcacccagcgacctgcaccaccaccaggacctcgagatcatcgtcatcctggaaggcgtggtggaaaccacgggcatcaccacccaggcccgcacctcctacctggccgatgagatcctgtggggccagcgctttgtgcccattgtagctgaggaggacggacgttactctgtggactactccaagtttggcaacaccatcaaagtgcccacaccactctgcacggcccgccagcttgatgaggaccacagcctactggaagctctgaccctcgcctcagcccgcgggcccctgcgcaagcgcagcgtgcccatggccaaggccaagcccaagttcagcatctctccagattccctgtcctgagccatggtctctcgggccccccacacgcgtgtgtacacacggaccatgtggtatgtagcccagccagggcctggtgtgaggctgggccagcctcagctcagcctccccctgctgctcatccagggtgttacaaggcacttgtcactatgctatttctggcctcagcaggaacctgtactgggttatttttgtccctgctcctcccaacccaatttaggactggctcacccctctcccccgcccaaggctgcagaggctgtgggaggtactgggccctagagctgtgcgtccagccagtcctgggtccccacgattgaccagccacactctgggccggtggctggggaagaacaatctccgagggctgctgctttgcgtctgtggctccaagaagtgcctgtggtcaggccccagctctacttggtccctgaaaaagcacccggctaagggctgggcctggccagcagggagggcagttgatgagagagggtgttcccgctggagggttggtgctgtggagcctacaccggcagggacagcctggggctgacagggctcccctccgagggccagtttcaggtctggaaggggaggaagcaggggaaggtgacctgaggaggctcggctttgtagagccccgctcaggcacagggaggaggagatgccagggctcctgccttttgccacatcggcctcgtgcagtgagggctctgtgggctggggctgctgcccctgcctacctcctgcctgtccccagaggctgaggagagggggtactgtgcccaccacacatgattaggcctcagacccaactctggtcctggctccacaacagtggctgccactcactttgtccagaaggtggcttgggggtggatatctttgggttgctggaaaaggtgtgggaaggttcaggatggtgggagggactgaggtccctgaggtgaagaggcccttggtcctgacgggtttgacccgtgcctggacccttggagcagtgttgtgtgaacttgcctagaactctgccttctccgttgtcaataaagcctccccctcatgacctaaaaaaaaaaaaaaaaaaagggc

SEQ ID NO: 26 - DNA, 466 bp, Homo sapiens
tcgacccacgcgtccgcggacgcgtgggcggctccccgcaccatcatggctttgcctctgaggcccctgacccggggcttggccagcgctgccaaaggaggccacggaggagcaggagctcgtacctggcgtctgctgaccttcgtgctggcgctgcccagcgtggccctctgcaccttcaactcctatctccactcgggccaccgcccgcgccccgagttccgtccctaccaacacctccgcatccgcaccaagccctacccctggggggacggcaaccacactctgttccacaatagccacgtgaaccctctgcccacgggctacgaacacccctgaggccccggacgcccccggacacaataaaggtgtgaagcttcaaaaaaaaaaaaaaaaaaaaaaaaaaaaaaaaaaaaaaaaaaaaaaaaaaaaaaaaaaaaaaaaaaaaaaaaaaaaaaaaaagggc

SEQ ID NO: 27 - DNA, 885 bp, Homo sapiens
gccggcgggcccgcgagtccgagacctgtcccaggagctccagctcacgtgacctgtcactgcctcccgccgcctcctgcccgcgccatgacccagccggtgccccggctctccgtgcccgccgcgctggccctgggctcagccgcactgggcgccgccttcgccactggcctcttcctggctgaccctggagcagccgcagggggattctatgatgacctgcgagcaggcccagctcttggccaacctggcgcggctcatccaggccaagaaggcgctggacctgggcaccttcacgggctactccgccctggccctggccctggcgctgcccgcggacgggcgcgtggtgacctgcgaggtggacgcgcagcccccggagctgggacggcccctgtggaggccgaggcggagcacaagatcgacctccggctgaagcccgccttggagaccctggacgagctgctggcggcgggcgaggccggcaccttcgacgtggccgtggtggatgcggacaaggagaactgctccgcctactacgagcgctgcctgcagctgctgcgacccggaggcatcctcgccgtcctcagagtcctgtggcgcgggaaggtgctgcaacctccgaaaggggacgtggcggccgagtgtgtgcgaaacctaaacgaacgcatccggcgggacgtcagggtctacatcagcctcctgcccctgggcgatggactcaccttggccttcaagatctagggctggcccctagtgagtgggctcgagggagggttgcctgggaaccccaggaattgaccctgagttttaaattcgaaaataaagtggggctgggacmcmcgaaaaaaaaaaaaaaaaaaaaaaaaaaaaaagtcgtatcga

SEQ ID NO: 28 - DNA, 659 bp, Homo sapiens
tcgacccacgcgtccgctttgctaagcgttcgtgagtatgtgtgtaaacacatacaatctgtgaatgaaaattgtgaccctcgttttgcacttttcgggccaacgagccaaaagatttgcccagaagtaaacagctagttagtgacttctgatttccatccatggtggttgtacttcctcaggaataaaaatgaatattctatattcttcttatgcccctctgggttttccttttcctctgggcccctcagactctagctgcaacagcaaggaaactggaacggaatcaaattgaatttgccttaaaatgcttttatggagacaaaatgataactaaacgtaaggaggtaggtaatagaggccgggcacggtggctcacgcctgtaattccagcaatttgggaggtcgaggtgggtggatcacctgaggtcaggaggtcgagaccagcctggccaatatggtgatgccctgtctctgctaaaaatacaaaaattagccaggcgtggtggtgcacacctataatcctagctacttgggaggctgaggcaggagaatcgcttgaaccccgggggcggaggttatagtgagccaagatcgccccacttcaccacagcctgggtgaaagagtgaaactccgtcaaaaaaaaaaaaaaaagggc

SEQ ID NO: 29 - DNA, 2529 bp, Homo sapiens
cattgcagactctagtgcagtggttcaatctcggctcactgcaacctccgcctccccgattcaagcgattctcctgcgtcagcctccccagtagctgagactacaggatgcagaaagcctcagtgttgctcttcctggcctgggtctgcttcctcttctacgctggcattgccctcttcaccagtggcttcctgctcacccgtttggagctcaccaaccatagcagctgccaagagcccccaggccctgggtccctgccatgggggagccaagggaaacctggggcctgctggatggcttcccgattttcgcgggttgtgttggtgctgatagatgctctgcgatttgacttcgcccagccccagcattcacacgtgcctagagagcctcctgtctccctacccttcctgggcaaactaagctccttgcagaggatcctggagattcagccccaccatgcccggctctaccgatctcaggttgaccctcctaccaccaccatgcagcgcctcaaggccctcaccactggctcactgcctacctttattgatgctggtagtaacttcgccagccacgccatagtggaagacaatctcattaagcagctcaccagtgcaggaaggcgtgtagtcttcatgggagatgatacctggaaagaccttttccctggtgctttctccaaagctttcttcttcccatccttcaatgtcagagacctagacacagtggacaatggcatcctggaacacctctaccccaccatggacagtggtgaatgggacgtgctgattgctcacttcctgggtgtggaccactgtggccacaagcatggccctcaccaccctgaaatggccaagaaacttagccagatggaccaggtgatccagggacttgtggagcgtctggagaatgacacactgctggtagtggctggggaccatgggatgaccacaaatggagaccatggaggggacagtgagctggaggtctcagctgctctctttctgtatagccccacagcagtcttccccagcaccccaccagaggagccagaggtgattcctcaagttagccttgtgcccacgctggccctgctgctgggcctgcccatcccatttgggaatatcggggaagtgatggctgagctattctcagggggtgaggactcccagccccactcctctgctttagcccaagcctcagctctccatctcaatgctcagcaggtgtcccgatttcttcatacctactcagctgctactcaggaccttcaagctaaggagcttcatcagctgcagaacctcttctccaaggcctctgctgactaccagtggcttctccagagccccaagggggctgaggcgacactgccgactgtgattgctgagctgcagcagttcctgcggggagctcgggccatgtgcatcgagtcttgggctcgtttctctctgagcttccttctcctacatctgcttgctgctgggatacccgtcaccacccctggtccttttactgtgccatggcaggcagtctcggcttgggccctcatggccacacagaccttctactccacaggccaccagcctgtctttccagccatccattggcatgcagccttcgtgggattcccagagggtcatggctcctgtacttggctgcctgctttgctagtgggagccaacacctttgcctcccacctcctctttgcagtaggttgcccactgctcctgctctggcctttcctgtgtgagagtcaagggctgcggaagagacagcagcccccagggaatgaagctgatgccagagtcagacccgaggaggaagaggagccactgatggagatgcggctccgggatgcgcctcagcacttctatgcagcactgctgcagctgggcctcaagtacctctttatccttggtattcagattctggcctgtgccttggcagcctccatccttcgcaggcatctcatggtctggaaagtgtttgcccctaagttcatatttgaggctgtgggcttcattgtgagcagcgtgggacttctcctgggcatagctttggtgatgagagtggatggtgctgtgagctcctggttcaggcagctatttctggcccagcagaggtagcctagtctgtgattactggcacttggctacagagagtgctggagaacagtgtagcctggcctgtacaggtactggatgatctgcaagacaggctcagccatactcttactatcatgcagccaggggccgctgacatctaggacttcattattctataattcaggaccacagtggagtatgatccctaactcctgatttggatgcatctgagggacaaggggggcggtctccgaagtggaataaaataggccgggcgtggtgacttgcacctataatcccagcactttgggaggcagaggtgggaggattgcttggtcccaggagttcaagaccagcctgtggaacataacaagaccccgtctctactatttaaaaaaaagkgtaataaaatgataatataatt

SEQ ID NO: 30 - DNA, 385 bp, Homo sapiens
tcgacccacgcgtccgcgttatcagcatgctctccctgccttgggcttttctttccgtcatgttttccttttcgtgttccttctctgatttctcttgtctctgctgctcacaggcctgcccatcagtcagtacagatactcagtgtctggtttctggccagctccgtggagggggctttaagcagaattctgactctttggggtgggggattaggaactgggggaaacttaatgatccagagattcccccaagaggagtgtctggaaggatctgtgcctggacagtggcagaacctttccagtgttcttttggttctgatttcatcagtctcaataaagttccgatctctctttaaaaaaaaaaaaaaaaaaaaaaaaaaaaaag

SEQ ID NO: 31 - DNA, 611 bp, Homo sapiens
  misc_feature (543)..(543): n equals a,t,g, or c
  misc_feature (555)..(555): n equals a,t,g, or c
gctggatactccaagggctcgctcattaaagataaccaccgcttccaagaggcagaacttcatcctcatcctctaatggactatggaaagaagaaaaacagtccttttacagtgaagaaactcagcagatgctccctcaacatcgctggtggtccatgtgtccatatctatgtgcatgtttgggcttggcaagttgcctcatacctataatcccagcactttgggaggctgaggcaggaggatcgcttgaggccaggagtttgagaccaacccggacagcatggtccccacaagaagcatgtagggcccaagcaccccctgccacctctgaaccccaagcacaggcacgagaaggatctttgcagctgcagttccctctgcctggaatgctgytcccctaagaccccaggtggcgtctccatctggctgccaagtctcctcctgagcgattatgcggattacctgatgagcacggcttcctccttggaagcaccttgttttgtctccggtactagaacgccagctccacaagggcagggcggntggtgatcttgnttttctctgtcccctcctgtctgacactatgcctggcatatggtggatgttcccag

SEQ ID NO: 32 - DNA, 1224 bp, Homo sapiens
tcgacccacgcgtccggctgcgtcgcgcgctcttcctcggagctacccaggcggctggtgtgcagcaagctccgcgccgaccccggacgcctgacgcctgacgcctgtacccggcccggcatgagccgctacctgctgccgctgtcggcgctgggcacggtagcaggcgccgccgtgctgctcaaggactatgtcaccggtggggcttgccccagcaaggccaccatccctgggaagacggtcatcgtgacgggcgccaacacaggcatcgggaagcagaccgccttggaactggccaggagaggaggcaacatcatcctggcctgccgagacatggagaagtgtgaggcggcagcaaaggacatccgcggggagaccctcaatcaccatgtcaacgcccggcacctggacttggcttccctcaagtctatccgagagtttgcagcaaagatcattgaagaggaggagcgagtggacattctaatcaacaacgcgggtgtgatgcggtgcccccactggaccaccgaggacggcttcgagatgcagtttggcgttaaccacctgggtcactttctcttgacaaacttgctgctggacaagctgaaagcctcagccccttcgcggatcatcaacctctcgtccctggcccatgttgctgggcacatagactttgacgacttgaactggcagacgaggaagtataacaccaaagccgcctactgccagagcaagctcgccatcgtcctcttcaccaaggagttgagccggcggctgcaaggctctggtgtgactgtcaacgccctgcaccccggcgtggccaggacagagctgggcagacacacgggcatccatggctccaccttctccagcaccacactcgggcccatcttctggctgctggtcaagagccccgagctggccgcccagcccagcacatacctggccgtggcggaggaactggcggatgtttccggaaagtacttcgatggactcaaacagaaggccccggcccccgaggctgaggatgaggaggtggcccggaggctttgggctgaaagtgcccgcctggtgggcttagaggctccctctgtgagggagcagcccctccccagataacctctggagcagatttgaaagccaggatggcgcctccagaccgaggacagctgtccgccatgcccgcagcttcctggcactacctgagccgggagacccaggactggc

SEQ ID NO: 33 - DNA, 1233 bp, Homo sapiens
tcgacccacgcgtccggtccgggtggtggactggattcgctgcggagccctggaagctgcctttccttctccctgtgcttaaccagaggtgcccatgggttggacaatgaggctggtcacagcagcactgttactgggtctcatgatggtggtcactggagacgaggatgagaacagcccgtgtgcccatgaggccctcttggacgaggacaccctcttttgccagttcagggctcccagactcgagtcaagggggcccattctcaggactcccagaatacaccagcaggcccccagtctgagaaagagacttatgaccttaaggttgcatgccaggaagatgtcttttgatttcaagccatcatcgcaaaagaggagctttgtctttattgtcactgaagatttttgttaggaagagagcatcatgaatgatgatgaaatgaaaaatgcatcaaggacagatcggacccctgaggagacagcaggacctcctgcactgacccctcctcaagatccccactcggctcaggctctgaccttggcaagagatcccccagagaaggcactcctcttgtgggcatttggtctaccagggaactcttaaagattggactcaatgcctaaaggtattaatctataagggaggaattttatgtactgtgacaagctgtgagacattgttaagagtaacgcttctcgggaatcagaccttccctgcttctgagataccccagacaagaccagcaaaaccaccgacggtcccaaccctgggctcagtcgcagaatggaaagaaccatgattctccaaacctgcagccaggaggtgaatccactcaaaaaaccccacctgctgctgccatccagtcagccctgcaagctcccctagggatgggagctgctgctcaaagcgtcctgctttttggtgttgaaaagctccgttcttcagaaagtacattcttaccccgaggccctgctgctcttcttgaacaccaaccctacctgttgtagtgcggatccacgaggtgcacaaactagtctagtttctcatcttctttgtggtcattcatgtgtgtggtgacaggtgccatgccctgccctgccccttcatccccagctccccccaacctgggcagtcatccccagtccttcaacctctctcaggggccttggtctctcctgtttaaatacatttcttttagagacaaaaaaaaaaaaaaaaaaaaaaaaaagggc

SEQ ID NO: 34 - DNA, 791 bp, Homo sapiens
ccacgcgtccggatgcttctaggtccttagaactgcccagaaactctgagtcccagcagctgggagccagaactttgcctgccctcccttggttccagtctctcttctctctctctgccttggaacctgaccatactttagttgtgcccttcccaggcatcatcctcctaccaccaacctggggccccatcttggaatgggggctccttggggccagcccagtgtggctcaccacactcttcttttttttttttttttttttgagatggagtcttgctctgttgcccaggctggagtacatttgcctgatgtcagctccctgcaacctccgcctcctgggttcaagcgattctcctgcctcagcctcctgagtagctgggattacaggtgtgcaccaacacacccggctaatttttgtatttgtagaagaggcggggtttcaccatgttggccaggctggtgttgaactcctgacctcaagtgatctgcctgccttggcctcccaaagtgctgggattacaggtgtgagctgccacgcccagccccagtacactcttctctggaccagatctgtcccagtcctggatgcctcctcctactggtgccttcttttcttccagaggatttctctctccttcctcctcctttctttgggatccctgggttgccctgtcccaacctccttgttaggtgctttcccataggaggcccttcttgagaaacaataaactaggtagaactaaaaaaaaaaaaaaaaaaaaaaaaaaaaaaaaaaaaaaaaaaaaaaaaaa

SEQ ID NO: 35 - DNA, 1834 bp, Homo sapiens
gcccgggaccacggctgccagccccactgctacacccatacaccatctcccaccgagagtcatggccccattggccctgcacctcctcgtcctcgtccccatcctcctcagcctggtggcctcccaggactggaaggctgaacgcagccaagaccccttcgagaaatgcatgcaggatcctgactatgagcagctgctcaaggtggtgacctgggggctcaatcggaccctgaagccccagagggtgattgtggttggcgctggtgtggccgggctggtggccgccaaggtgctcagcgatgctggacacaaggtcaccatcctggaggcagataacaggatcgggggccgcatcttcacctaccgggaccagaacacgggctggattggggagctgrgccatgcgcatgcccagctctcacaggatcctccacaagctctgccagggcctggggctcaacctgaccaagttcacccagtacgacaagaacacgtggacggaggtgcacgaagtgaagctgcgcaactatgtggtggagaaggtgcccgagaagctgggctacgccttgcgtccccaggaaaagggccactcgcccgaagacatctaccagatggctctcaaccaggccctcaaagacctcaaggcactgggctgcagaaaggcgatgaagaagtttgaaaggcacacgctcttggaatatcttctcggggaggggaacctgagccggccggccgtgcagcttctgggagacgtgatgtccgaggatggcttcttctatctcagcttcgccgaggccctccgggcccacagctgcctcagcgacagactccagtacagccgcatcgtgggtggctgggacctgctgccgcgcgcgctgctgagctcgctgtccgggcttgtgctgttgaacgcgcccgtggtggcgatgacccagggaccgcacgatgtgcacgtgcagatcgagacctctcccccggcgcggaatctgaaggtgctgaaggccgacgtggtgctgctgacggcgagcggaccggcggtgaagcgcatcaccttctcgccgccgctgccccgccacatgcaggaggcgctgcggaggctgcactacgtgccggccaccaaggtgttcctaagcttccgcaggcccttctggcgcgaggagcacattgaaggcggccactcaaacaccgatcgcccgtcgcgcatgattttctacccgccgccgcgcgagggcgcgctgctgctggcctcgtacacgtggtcggacgcggcggcagcgttcgccggcttgagccgggaagaggcgttgcgcttggcgctcgacgacgtggcggcattgcacgggcctgtcgtgcgccagctctgggacggcaccggcgtcgtcaagcgttgggcggaggaccagcacagccagggtggctttgtggtacagccgccggcgctctggcaaaccgaaaaggatgactggacggtcccttatggccgcatctactttgccggcgagcacaccgcctacccgcacggctgggtggagacggcggtcaagtcggcgctgcgcgccgccatcaagatcaacagccggaaggggcctgcatcggacacggccagccccgaggggcacgcatctgacatggaggggcaggggcatgtgcatggggtggccagcagcccctcgcatgacctggcaaaggaagaaggcagccaccctccagtccaaggccagttatctctccaaaacacgacccacacgaggacctcgcattaaagtattttcggaaaaaaaaaaaaaaaaaaaaaaaaaaaaaaaaaaaaaaaaaaaaaaaaaaaagggcggcc

SEQ ID NO: 36 - DNA, 3289 bp, Homo sapiens
cccacgcgtccgcccacgcgtccggaacaggcctgtctcaggcaggccctgcgcctcctatgcggagatgctactgccactgctgctgtcctcgctgctgggcgggtcccaggctatggatgggagattctggatacgagtgcaggagtcagtgatggtgccggagggcctgtgcatctctgtgccctgctctttctcctacccccgacaagactggacagggtctaccccagcttatggctactggttcaaagcagtgactgagacaaccaagggtgctcctgtggccacaaaccaccagagtcgagaggtggaaatgagcacccggggccgattccagctcactggggatcccgccaaggggaactgctccttggtgatcagagacgcgcagatgcaggatgagtcacagtacttctttcgggtggagagaggaagctatgtgagatataatttcatgaacgatgggttctttctaaaagtaacagccctgactcagaagcctgatgtctacatccccgagaccctggagcccgggcagccggtgacggtcatctgtgtgtttaactgggcctttgaggaatgtccacccccttctttctcctggacgggggctgccctctcctcccaaggaaccaaaccaacgacctcccacttctcagtgctcagcttcacgcccagaccccaggaccacaacaccgacctcacctgccatgtggacttctccagaaagggtgtgagcgcacagaggaccgtccgactccgtgtggcctatgcccccagagaccttgttatcagcatttcacgtgacaacacgccagccctggagccccagccccagggaaatgtcccatacctggaagcccaaaaaggccagttcctgcggctcctctgtgctgctgacagccagccccctgccacactgagctgggtcctgcagaacagagtcctctcctcgtcccatccctggggccctagacccctggggctggagctgcccggggtgaaggctggggattcagggcgctacacctgccgagcggagaacaggcttggctcccagcagcgagccctggacctctctgtgcagtatcctccagagaacctgagagtgatggtttcccaagcaaacaggacagtcctggaaaaccttgggaacggcacgtctctcccagtactggagggccaaagcctgtgcctggtctgtgtcacacacagcagccccccagccaggctgagctggacccagaggggacaggttctgagcccctcccagccctcagaccccggggtcctggagctgcctcgggttcaagtggagcacgaaggagagttcacctgccacgctcggcacccactgggctcccagcacgtctctctcagcctctccgtgcactactccccgaagctgctgggcccctcctgctcctgggaggctgagggtctgcactgcagctgctcctcccaggccagcccggccccctctctgcgctggtggcttggggaggagctgctggaggggaacagcagccaggactccttcgaggtcacccccagctcagccgggccctgggccaacagctccctgagcctccatggagggctcagctccggcctcaggctccgctgtgaggcctggaacgtccatggggcccagagtggatccatcctgcagctgccagataagaagggactcatctcaacggcattctccaacggagcgtttctgggaatcggcatcacggctcttcttttcctctgcctggccctgatcatcatgaagattctaccgaagagacggactcagacagaaaccccgaggcccaggttctcccggcacagcacgatcctggattacatcaatgtggtcccgacggctggccccctggctcagaagcggaatcagaaagccacaccaaacagtcctcggacccctcttccaccaggtgctccctccccagaatcaaagaagaaccagaaaaagcagtatcagttgcccagtttcccagaacccaaatcatccactcaagccccagaatcccaggagagccaagaggagctccattatgccacgctcaacttcccaggcgtcagacccaggcctgaggcccggatgcccaagggcacccaggcggattatgcagaagtcaagttccaatgagggtctcttaggctttaggactgggacttcggctagggaggaaggtagagtaagaggttgaagataacagagtgcaaagtttccttctctccctctctctctctctttctctctctctctctctttctctctcttttaaaaaaacatctggccagggcacagtggctcacgcctgtaatcccagcactttgggaggttgaggtgggcagatcgcctgaggtcgggagttcgagaccagcctggccaacttggtgaaaccccgtctctactaaaaatacaaaaattagctgggcatggtggcaggcgcctgtaatcctacctacttgggaagctgaggcaggagaatcacttgaacctgggagacggaggttgcagtgagccaagatcacaccattgcacgccagcctgggcaacaaagcgagactccatctcaaaaaaaaaatcctccaaatgggttgggtgtctgtaatcccagcactttgggaggctaaggtgggtggattgcttgagcccaggagttcgagaccagcctgggcaacatggtgaaaccccatctctacaaaaaatacaaaacatagctgggcttggtggtgtgtgcctgtagtcccagctgtcagacatttaaaccagagcaactccatctggaataggagctgaataaaatgaggctgagacctactgggctgcattctcagacagtggaggcattctaagtcacaggatgagacaggaggtccgtacaagatacaggtcataaagactttgctgataaaacagattgcagtaaagaagccaaccaaatcccaccaaaaccaagttggccacgagagtgacctctggtcgtcctcactgctacactcctgacagcaccatgacagtttacaaatgccatggcaacatcaggaagttacccgatatgtcccaaaagggggaggaatgaataatccaccccttgtttagcaaataagcaagaaataaccataaaagtgggcaaccagcagctctaggcgctgctcttgtctatggagtagccattcttttgttcctttactttcttaataaacttgctttcaccttacaaaaaaaaaaaaaaaaaaaaaaaaaaaaaaaaaaaaaaaaaaaaaaaaa

SEQ ID NO: 37 - DNA, 923 bp, Homo sapiens
  misc_feature (6)..(6): n equals a,t,g, or c
  misc_feature (908)..(908): n equals a,t,g, or c
aacggnaaaatctccccttactattgggaacaaaagctggagctccaccgcggtggcggccgctctagaactagtggatcccccgggctgcaggaattcggcacgagccgaggaagagcgttttggggacgggggctggtgaggctcacgttggagggcttcgcgtctgcttcggagaccgtaaggatattgatgaccatgagatccctgctcagaacccccttcctgtgtggcctgctctgggccttttgtgccccaggcgccagggctgaggagcctgcagccagcttctcccaacccggcagcatgggcctggataagaacacagtgcacgaccaagagcatatcatggagcatctagaaggtgtcatcaacaaaccagaggcggagatgtcgccacaagaattgcagctccattacttcaaaatgcatgattatgatggcaataatttgcttgatggcttagaactctccacagccatcactcatgtccataaggaggaagggagtgaacaggcaccactaatgagtgaagatgaactgattaacataatagatggtgttttgagagatgatgacaagaacaatgatggatacattgactatgctgaatttgcaaaatcactgcagtagatgttatttggccatctcctggttatatacaaatgtgacccgtgataatgtgattgaacactttagtaatgcaaaataactcatttccaactactgctgcagcattttggtaaaaacctgtagcgattcgttacactggggtgagaagagataagagaaatgaaagagaagagaaatgggacatctaatagtccctaagtgctattaaataccttattggacaaggcaaaaaaaaaaaaaaaaaactcgagsgggggcccggtacccaattcggngtatgtgccgttggt

SEQ ID NO: 38 - DNA, 655 bp, Homo sapiens
aaaacagatgtgaggatgatcttattctaagagctgtgcattgtgttccagccccaggttgtctgatactttcctttcttatctcccacctggctcatggcctctcctgcatcagtagtgcctgctgtgggcttcctgaggctgcacagcatgcttctcattgcttgtccgccacatgcttctctggggcttcctctccatgtccgccagcagcctgttgagctaaggcaccttccctttccttgttgctcttctctttctccactttcttcttgggcatacagggtcttgcccttttgcccatgctggagtacagtggcacaatcacggcttactgcagcctcaacctcccagactcaagtggtcctcccacctcagccccatccccgaccccctcagcctcccaaagtgcttgcattacagacgtgagccacacgttaaatcttcgtaataaccctttgatgtaggttttgtcattatctccatttttacatgagactactgaaacacacagttaatccttcwwgtracttgcccaacgtgtcacagctgattcattggaacagctagtcaagcagcagattacagaattaatgaactgaaaaaaattacacagaatataaaatagaaagataaagaaaaaaaaaaaaaaaag

SEQ ID NO: 39 - DNA, 975 bp, Homo sapiens
ggcacgagctggatggcatctacttcgtatgactattgcagagtgcccatggaagacggggataagcgctgtaagcttctgctggggataggaattctggtgctcctgatcatcgtgattctgggggtgcccttgattatcttcaccatcaaggccaacagcgaggcctgccgggacggccttcgggcagtgatggagtgtcgcaatgtcacccatctcctgcaacaagagctgaccgaggcccagaagggctttcaggatgtggaggcccaggccgccacctgcaaccacactgtgatggccctaatggcttccctggatgcagagaaggcccaaggacaaaagaaagtggaggagcttgagggagagatcactacattaaaccataagcttcaggacgcgtctgcagaggtggagcgactgagaagagaaaaccaggtcttaagcgtgagaatcgcggacaagaagtactaccccagctcccaggactccagctccgctgcggcgccccagctgctgattgtgctgctgggcctcagcgctctgctgcagtgagatcccaggaagctggcacatcttggaaggtccgtcctgctcggcttttcgcttgaacattcccttgatctcatcagttctgagcgggtcatggggcaacacggttagcggggagagcacggggtagccggagaagggcctctggagcaggtctggaggggccatggggcagtcctgggtgtggggacacagtcgggttgacccagggctgtctccctccagagcctccctccggacaatgagtcccccctcttgtctcccaccctgagattgggcatggggtgcggtgtggggggcatgtgctgcctgttgttatgggttttttttgcggggggggttgcttttttctggggtctttgagctccaaaaaataaacacttcctttgagggagagcacaccttaaaaaaaaaaaaaaaaaa

SEQ ID NO: 40 - DNA, 1778 bp, Homo sapiens
ggcacgagggcgcttaggggctgaggcgcgatggcaggtgtcggggctgggcctctgcgggcgatggggcggcaggccctgctgcttctcgcgctgtgcgccacaggcgcccaggggctctacttccacatcggcgagaccgagaagcgctgtttcatcgaggaaatccccgacgagaccatggtcatcggcaactatcgtacccagatgtgggataagcagaaggaggtcttcctgccctcgacccctggcctgggcatgcacgtggaagtgaaggaccccgacggcaaggtggtgctgtcccggcagtacggctcggagggccgcttcacgttcacctcccacacgcccggtgaccatcaaatctgtctgcactccaattctaccaggatggctctcttcgctggtggcaaactgcgtgtgcatctcgacatccaggttggggagcatgccaacaactaccctgagattgctgcaaaagataagctgacggagctacagctccgcgcccgccagttgcttgatcaggtggaacagattcagaaggagcaggattaccaaagggcaagtgcatatctccttgtaatttgagagggcagttgacctttatacccactatacctactcaagtttctgcttgggagatcagctctgcagagaatggaatgagaagtattggtttagataggttgtttgtttgttgtttttgagacggagtttcactcttgttgcccatgctggagtgcaatgccatgatcttggctcactgcaacctccgcctccccaggttcaagcgattctcctgcctcagcctcctgagtagctgggattacaggcatgcgccaccatgcctggctaattttgtacttttagtagagacgggggtttctccatgttggtcaggctggtctcgaactcccgacatcaagtgatccgcccgcctcagcctcccaaagtgctgggattacaggtgtgagctaccgcgccctgcctgttttgcttttttatcaaaacattttattgtggtaaaatataacaccaaatgtgtcattttaactgtctatatagttcagtggtattaagtgccttcataatgttgtgctaccaacaccatcatccagctccagaactttttcatcttctcaaactaaaaatctgtacttattttgttttgtttttgagatggagtctcgctctgttgcccaggctggagcgcagtggcgccatctcggctcactgcaccctccgcctcccaggttcaagcgattctcctgcctcagcctcccaagtagctgggattacaggcaagtgccaccatgcgtggctcatttttgtgtttttagtagagactgggtttcaccatgttggccaggctggtcttgaactcctggcctcaggcaatccactgccgcagcctcccaaagtgttgggattacaggcgtgagccactgcacccagcaaatctgtacttattataaacaataacttcccgtttccttttgtcctgacacccaccattctactttctgtctctatgatcctgactaccctatctcatataagtggaatcattcagtatttgtccttttgtgactggcttatttcactgagtataatgttctcacagttcatccatgttatagcatgtgtcagaatttcttaaggctaatattccattgtatgcatgtgccacatttcgctttcagtagtcatttttaagctctataaaataaaatgaagaaaggacagttcacaatctaaaaaaaaaaaaaaaaaaa

SEQ ID NO: 41 - DNA, 516 bp, Homo sapiens
tcgacccacgcgtccgctgcttggatactggtgctggcacagttccttctgtcaccaactttgctccccagccccagaatgttgacagtcgctctcctagcccttctctgtgcctcagcctctggcaatgccattcaggccaggtcttcctcctatagtggagagtatggaagtggtggtggaaagcgattctctcattctggcaaccagttggacggccccatcaccgccctccgggtccgagtcaacacatactacatcgtaggtcttcaggtgcgctatggcaaggtgtggagcgactatttgggtggtcgcaacggagacctggaggagatctttctgcaccctggggaatcagtgatccaggtttctgggaagtacaagtggtacctgaagaagctggtatttgtgacagacaagggccgctatctgtcttttgggaaagacagtggcacaagtttcaatgccgtccccttgcaccccaacaccgtgctccgcttcaaaaaaaaaaaaaaa

SEQ ID NO: 42 - DNA, 1319 bp, Homo sapiens
  misc_feature (49)..(49): n equals a,t,g, or c
aaatagtcaaagagagtgggagagcgaatgagtcagggaaacgcagtgngacttttgggtggcactgagacacctgggctgagacatacaggacagagcatggctcgcctacagactgcactcctggttgtcctcgtcctccttgctgtggcgcttcaagcaactgaggcaggcccctacggcgccaacatggaagacagcgtctgctgccgtgattacgtccgttaccgtctgcccctgcgcgtggtgaaacacttctactggacctcagactcctgcccgaggcctggcgtggtgttgctaaccttcagggataaggagatctgtgccgatcccagagtgccctgggtgaagatgattctcaataagctgagccaatgaagagcctactctgatgaccgtggccttggctcctccaggaaggctcaggagccctacctccctgccattatagctgctccccgccagaagcctgtgccaactctctgcattccctgatctccatccctgtggctgtcacccttggtcacctccgtgctgtcactgccatctcccccctgacccctctaacccatcctctgcctccctccctgcagtcagagggtcctgttcccatcagcgattcccctgcttaaacccttccatgactccccactgccctaagctgaggtcagtctcccaagcctggcatgtggccctctggatctgggttccatctctgtctccagcctgcccacttcccttcatgaatgttgggttctagctccctgttctccaaacccatactacacatcccacttctgggtctttgcctgggatgttgctgacactcagaaagtcccaccacctgcacatgtgtagccccaccagccctccaaggcattgctcgcccaagcagctggtaattccatttcatgtattagatgtcccctggccctctgtcccctcttaataaccctagtcacagtctccgcagattcttgggatttgggggttttctcccccacctctccactagttggaccaaggtttctagctaagttactctagtctccaagcctctagcatagagcactgcagacaggccctggctcagaatcagagcccagaaagtggctgcagacaaaatcaataaaactaatgtccctcccctctccctgccaaaaggcagttacatatcaatacagagactcaaggtcactagaaatgggccagctgggtcaatgtgaagccccaaatttgcccagattcacctttcttcccccactccctttttttttttttttttgagawggagttygctcttggacccacctgga

SEQ ID NO: 43 - DNA, 1556 bp, Homo sapiens
tcgacccacgcgtccggtctccatggatccatttgtagtcttggtgctttgtctgtcctttctgcttctcctgtcactgtggagacagagatctgcaagagggaacctccctcctggacccactcctctcccaattattggcaattaccacctgatagatatgaaggacattggccagtgccttactaatttttctaaaatatatggccctgtgttcactctgtattttggctcacagcctattgtgatattacatggttatgaggcaatgaaagaagccttcattgactatggagaagagttctctggaagaggaaggattccggtttttgacaaagtttctaaaggaaagggcattggttttagccatggaaatgtatggaaagccacaagggtcttcacagtcaataccttgaggaacttgggcatgggaaaaaggaccattgagaccaaagtgcaagaggaagcacagtggctcatgaaggaactgaagaaaacaaatggctcaccctgtgatccccaattcatcataggatgtgctccctgcaatgtcatctgctccattgttttccagaatcgttttgattataaggataaggattttcttagcttgataggaaaagtgaatgaatgcactgaaattttgagctctcctgagtgtcagattttcaatgcagtccctattcttattgattattgtccaggaagtcataacaaatttttaaaaaatcatacatggattaagagctatcttttggagaaaataaaagaacatgaagaatcattggatgttacaaatcctcgggacttcgttgattacttcctaattcaaagatgtcagaaaaatggcattgagcacatggactataccattgaacacctggcaacattggtgactgatctggtgtttggtgggacagagcccttaagctcaacgatgagatttgctctcctgctcttgatgaagcacacacacatcacagctaaagtccaggaagagattgacaatgtgattgggagacaccgcagcccctgtatgcaggacaggaaccacatgccttacacaaatgccatggtgcatgaggtccagcggtacattgaccttggcccaaatggtgtggtgcatgaagtaacctgtgatactaagttcagaaactacttcatccccaagggaacacaggtaatgacatctctgacatcagtgctgcatgacagcacagagttccccaacccagaggtgtttgaccctggccactttctagatgacaatggaaactttaagaaaagtgactacttcgtgcctttctcagcaggaaaacggatttgtgtgggagagagccttgcccgcatggagctgtttctattcctgaccaccattttacagaatttcaaactgaaacctctggttgatccaaaggacatcgatatgacccccaaacattctggattttctaaaattcctcccaatttccagatgtgctttatccctgtagaatgaagataataaaatagaagtgaagatgaaaaaaaaaaaaaaaaaaaaaaaaaaaaagggc

SEQ ID NO: 44 - DNA, 995 bp, Homo sapiens
agacacacctgtgtgcacgctttggtggagatatgcctttggacatgccagtggggttggaggcgatgctgggcatagagagtgggtggctgagcctccttcctgagctgctgtttgttttgagcttaakgkcctgtagagactctgcctcctctgctggttgccacctcctcttttttttttcctcagagatggggtctcgctatgttgtccagggtggtcttaaactcctgacctcgcaccttggcctcccggggtgctgggattgcaggcatgagccaccgtacttggccagcgtctcacttttaatagwggagctgtggctgggtgcagcggctcgtgtctgttgtcctagcgctttgggaggccaaggggggaggatcacttgaacccaggagtttgaggtcagtctgggcagcatggcgagacycagtctctacaaaaaatagaagaaattagctgggcatggtgatgcatgcctgcagtctcagctacttgggaggctgagccaggaagatagcttgagcccagaaagtcacgaaacwccaggagtgtggtctaggtcttgctgctcgccacacagaaagccagttactgaggacaagtattgccaaggaagaggctttataatcagatggtgcagccgaggagatgagagctcatcctcaaacccatctccctgactaaaactaggggtttatataacagggaagaaatgtagcaatgtgtaaaaaacaggaactagggagggcaaggaggcacctgtagtggtctggtgattttcagatctttgatatttttttgagaggcctcaatgtccttttctgaggaagaaactcacataaataagtttgaagctttaacagcaggtggtcaatttctctttatccaaaaacaactgtccatgggactattgagccggtttctccatgatcctgccactgcgctccagcctgggccatagagcaatttgtttcaaaaaaaaaaaaaaaaag

SEQ ID NO: 45 - DNA, 408 bp, Homo sapiens
atcagagtacataatcgtaagtgtatactactatcctagggccatcagggaatgatctagtctacatattagttgtatttcaggccaattactttagattttcatgtgataaaattccaaattaacttatatttttctcttaatggttttttttttgttgttgctgtttttgagagagggtcttgctctgtcgcccaggctggagtgcagcagcacaatcattgctcactacagcctcaaattcctggactcaagtgctcctcccatctcagcctccccagtagctgggactacagcatgcaccacgatacctggttatcttttttatttttttgtagagatgaggtctccctgtgttgcccaggctggtctcaaacacctggactcaagggatcctcctgcctcagc

SEQ ID NO: 46 - DNA, 2097 bp, Homo sapiens
aattcccgggtcgacccacgcgtccggtttcggggagaataggagccagaacctgagcccctaagccattcccctcaccaatgatggggtccccagtgagtcatctgctggccggcttctgtgtgtgggtcgtcttgggctgggtagggggctcagtccccaacctgggccctgctgagcaggagcagaaccattacctggcccagctgtttggcctgtacggcgagaatgggacgctgactgcagggggcttggcgcggcttctccacagcctggggctaggccgagttcaggggcttcgcctgggacagcatgggcctctgactggacgggctgcatccccagctgcagacaattccacacacaggccacagaaccctgagctgagtgtggatgtctgggcagggatgcctctgggtccctcagggtggggtgacctggaagagtcaaaggcccctcacctaccccgtgggccagccccctcgggcctggacctccttcacaggcttctgttgctggaccactcattggctgaccacctgaatgaggattgtctgaacggctcccagctgctggtcaattttggcttgagccccgctgctcctctgacccctcgtcagtttgctctgctgtgcccagccctgctttatcagatcgacagccgcgtctgcatcggcgctccggcccctgcacccccaggggatctactatctgccctgcttcagagtgccctggcagtcctgttgctcagcctcccttctcccctatccctgctgctgctgcggctcctgggacctcgtctactacggcccttgctgggcttcctgggggccctggcggtgggcactctttgtggggatgcactgctacatctgctaccgcatgcacaagaagggcggcacgcaggacctggcggactaccagagaaggacctgggcccggggctgtcagtgctcggaggcctcttcctgctctttgtgctggagaacatgctggggcttttgcggcaccgagggctcaggccaagatgctgcaggcgaaaacgaaggaatctcgaaacacgcaacttggatccggagaatggcagtgggatggcccttcagcccctacaggcagctccagagccaggggctcagggccagagggagaagaacagccagcacccaccagctctggcccctcctgggcaccaaggccacagtcatgggcaccagggtggcactgatatcacgtggatggtcctcctgggagatggtctacacaacctcactgatgggctggccataggtgctgccttctctgatggcttctccagcggcctcagtaccaccttagcggtcttctgccatgagctgccccacgaactgggtgactttgccatgctgctccagtcagggctgtcctttcggcggctgctgctgctgagcctcgtgtctggagccctgggattggggggtgcagtcctgggggtggggctcagcctgggccctgtccccctcactccctgggtgtttggggtcactgctggggtcttcctctatgtggcccttgtggacatggtgagagatgtcgggtagagcagagaaatcaagggcagtggggaggcgggagtggagagggaggtagcagtccctccgcctctaccattagctcctggaagggcgtcagaccataggccccgcaaaagtctgagaaacaagggactaaggtgtttgggtggggggctgctgatgctttctgacaccattcctctggagttgagaggtcaggggcaaggccagaatcctgacatcctctttttctttcagctaccagccctgcttcgtcctccggagcccctgcctacgccccatgtgctcctgcaggggctggggctgctgctggggggcggcctcatgcttgccataaccctgctggaggagcggctactgcccgtgaccactgagggctgatggggccagggaaaaggggtcgggttgcccttccttccccccaaccacaggaagggaggcggaacacaggcccagtaggagcaataggattttaataaacagaccccatcccaaaaaaaaaaaaaaaaaaaaaaaaaaggggggg

SEQ ID NO: 47 - DNA, 1002 bp, Homo sapiens
  misc_feature (991)..(991): n equals a,t,g, or c
cggacgcgtgggcggacgcgtgggccggagtggagggagaggcccgggtcccgcgctcccctgggcgccccacggcagcctcagagccccgcggggagcgcgcagccctcggggcgggcgccgggatgtgtgacgggagccacttggcctccaccctccgctattgcatgacagtcagcggcacagtggttctggtggccgggacgctctgcttcgcttggtggagcgaaggggatgcaaccgcccagcctggccagctggccccacccacggagtatccggtgcctgagggccccagccccctgctcaggtccgtcagcttcgtctgctgcggtgcaggtggcctgctgctgctcattggcctgctgtggtccgtcaaggccagcatcccagggccacctcgatgggacccctatcacctctccagagacctgtactacctcactgtggagtcctcagagaaggagagctgcaggacccccaaagtggttgacatccccacttacgaggaagccgtgagcttcccagtggccgaggggcccccaacaccacctgcataccctacggaggaagccctggagccaagtggatcgagggatgccctgctcagcacccagcccgcctggcctccacccagctatgagagcatcagccttgctcttgatgccgtttctgcrgagacgacaccgagtgccacacgctcctgctcaggcctggttcagactgcacggggaggaagttaaaggctcctagcaggtcctgaatccagagacaaaaatgcygtgccttctccagagtcttatgcagtgcctgggacacagtaggcactcagcaaacgttcgttgttgaaggctgttctatttatctattgctgtataacaaaccaccccagaatttagtggcttaaaataaatcccattttattatgaaaaaaaaaaaaaaaaaactcgtagggggggctccggtacccaatcgccctgatgagtgagtngtattgttccg

SEQ ID NO: 48 - DNA, 2139 bp, Homo sapiens
tcgacccacgcgtccggtggtcgacgggcaagtwgagaccgcgagggtctggaggggcgaccggcctggcacagaggggaaggaagagagcgggatgctaagtgccgtctggggagccggagggcccggggcgggcggggctgctcgaggacagccgagcagaaaagaattgctgctgaggcaccacctttggagcggtcctcgctgcctgtccttcccgctgggctcactccccgcgtctctcctggggcttcctggagccacttcccacaggagctgcttgtccccaaatcttgcctcaggacttgctgccaggggaacgcagactcagagcgtcctctttggagaagtaaggctgcctctggacggaggagtgaggggggcgaggaaacgcagaarmtgaaagcacaaccagtaccttctcagctgcgtggggggcgggagggcctgtagataatcttgcgtttttcgtcatcttattccagttctgtgggggatgagtttttttgtgggttgctttttcttcagtgctaagaaagttccctccaacaggaactctctgacctgtttattcaggtgtatttctggtttggatttttttttccttctttgttttaacaaatggatccaggatggataaatccaccgagataagggttttggtcactgtctccacctcagttcctcagggctgttggccaccctatgactaactggaagaggacacgccagagcttcagtgaggtttccgagcctctccctgcccatcctcaccactgaggccacgacaaagcacagctccagctcggacagcaccctcagtgccagccagcctctgccagacctctctttccctcttctccccagcctcctccagggctgcccaaggcagggtttccagccaggcctcggggtcatcttttcaccaggagcaaacccaagtcttagttgctacaagaaaatcccctggaagtactgggggccaggttccccagacagcaggaattgcccctgttcagagcagccggagtttgctggaccacaaggaagaagagaagagacttgcagtgaactgtttttgtgccaagaaaccctggacctggggccaagtatttcccaagccaagcatccacttgtctgtgtctgggaagggatggccaaggccgctagggtccttacccctcaggatcactccccagccctttcctcaggaggtaccgctctccaaggtgtgctagcagtgggccctgcccaacttcaggcagaacagggaggcccagagattacagatcccctcctgtaagtggccaggcattctctccctgccctctctggcctctggggtcatactcacttctttagccagccccatcccctccaccccacacctgagttcttgcctcctccttttggggacacccaaaacactgcttgtgagaaggaagatggaaggtaagttctgtcgttctttccccaatccccaggaatggacaagaagccaacttagaaagaagggtctcacgtggctggcctggctcctccgtagacccctgttcttttcaacctctgcccacccgtgcatgtcatcacaaacatttgctcttaagttacaagagaccacatccacccagggattagggttcaagtagcagctgctaacccttgcaccagcccttgtgggactcccaacacaagacaaagctcaggatgctggtgatgctaggaagatgtccctcccctcactgccccacattctcccagtggctctaccagcctcacccatcaaaccagtgaatttctcaatcttgcctcacagtgactgcagcgccaagcggcatccaccaagcatcaagttggagaaaagggaacccaagcagtagagagcgatattggagtcttttgttcattcaaatcttggatttttttttttccctaagagattctctttttagggggaatgggaaacggacacctcataaagggttcaaagatcatcaatttttctgactttttaaatcattatcattattatttttaattaaaaaaatgcctgtatgcctttttttggtcggattgtaaataaatataccattgtcctamaaaaaaaaaaaaaaaaaaaaaaaaaaaaaaaaaaaaaag

SEQ ID NO: 49 - DNA, 940 bp, Homo sapiens
gcaggataaggtgttccagaccctgcctgacacctgatccgaagaggttgctcatgtttgctcaggaggtgaggttcacacaataaagggcaggaggagggcttggacctggtataaaacatctggaagtttccagggggctgctttgcatctgaaactgtcagccccagaatgttgacagtcgctctcctagcccttctctgtgcctcagcctctggcaatgccattcaggccaggtcttcctcctatagtggagagtatggaagtggtggtggaaagcgattctctcattctggcaaccagttggacggccccatcaccgccctccgggtccgagtcaacacatactacatcgtaggtcttcaggtgcgctatggcaaggtgtggagcgactatgtgggtggtcgcaacggagacctggaggagatctttctgcaccctggggaatcagtgatccaggtttctgggaagtacaagtggtacctgaagaagctggtatttgtgacagacaagggccgctatctgtcttttgggaaagacagtggcacaagtttcaatgccgtccccttgcaccccaacaccgtgctccgcttcatcagtggccggtctggttctctcatcgatgccattggcctgcactgggatgtttaccccactagctgcagcagatgctgagcctcctctccttggcaggggcactgtgatgaggagtaagaactcccttatcactaacccccatccaaatggctcaataaaaaaatatggttaaggctaaaaaaaaaaaaaaaaaaaaaaaaaaaaaaaaaaaaaaaaaaaaaaaaaaaaaaaaaaaaaaaaaaaaaaaaaaaaaaaaaaaaaaaaaaaaaaaaaaaaaaaaaaaaaaaaaaaaaaaaaaaaaaaaaaaaaaaaaaaaaaaagggggggccccgcctaaaaaaaa

SEQ ID NO: 50 - DNA, 705 bp, Homo sapiens
ctattttaaagggttgttgtgaggcctagaacagtgcttggactcctgtaagcactttatataatgggggctgctgtgatgtgtaatggtcatgatgggagtgaggatgatgttgaaggtgatgaagataccacttctgttaacagaggcattgcctgcctttactgttgcctgttggaaagttgcttcaggggcatatacaatagcagtttcagggagtggtgtgacctgtagcaggaaggggaaagtcaggagaaaagaattttcttctctgcaagagactggggtaggtaccagctatttgacagggaggcactattcttggatgtccatctgcacactagattcatgagtgttggggattacctgggcatcccaaaccatattacagtgaattatgttattgttatttatttaacatgtacatatattttcaaaatatatagaaaatgtcagaatcggaaaaaaaatcatagggacttaggcagttattggagcttgctttaaaaacccatatcagtgttgaccagtatctgggtttcaagagaattgtcaggaaaagcagtmwtaggtcaggagtggtggctcacacccataatcccagcactctgggaggccagggtgggtggattgattgagctcaggagtttgagaccagcmtaagcaacatggtgaaaacccatctctacaaaaaaaaaaaaaaag

SEQ ID NO: 51 - DNA, 1018 bp, Homo sapiens
  misc_feature (4)..(4): n equals a,t,g, or c
cccnttttttttttttttttttttttttttttttttttttttttttttttttttttttttccagatcagcacaaagtttattagccatttctgctcagaagagcccctttctgaacaggactgttcctctgacataacagacaagaaacagccacctgtgcagggcctttcctttatatctcaagctacatcaggagaacatcttggagcaatgtcagttgccccctggggttccctgggaatagctaaggtgtgagattgtccagagtcctatgacagaccttcaaggttttaagttccacagacttggactttgtccaggtccacaaccaacgaatagaaaccttcctttcaggtaaacaacatattgtacaaaaaagggaggatgataacataatagagaaagagctaagacccattgcttctcctctgtaaaaacaccaaactttatccaatactataaaaaagaaattcctgctgggaacagtggctcacgccgtaatcccagatgtgactacttagagacagatgtctaaggaggtcactaggtcaagtgaggttgttgggcgggcccggatccggcagactggggtccygtaagaagacraratggggacccacacagaaggacgaccacatgagatgcgggaagttgttggcggccacaagccaaggagggacytcgagggagccaaccctgctgacactgtgacctccgactccagcctctaggaccatgaggaaatacacgcaccttgtgtaagccctggtctgtggtgttttgctggggcagccccaggacacgggcatgacagggagtcaccatctttgggtggcattggatgaaggagccaccggacgggtgcagagagagccggaagccgaagccccaggcttgggcctcgctgaccacaggcagcccctgcccctgcccctgcccctgcccctgcccgggcccgcacccacctgggagcagagctggtgcatcacgtggccaaactcatctcgtgccgaattc

SEQ ID NO: 52 - DNA, 2046 bp, Homo sapiens
ggcacgagcagacacttccctctgtgaccatgaaactctgggtgtctgcattgctgatggcctggtttggtgtcctgagctgtgtgcaggccgaattcttcacctctattgggcacatgactgacctgatttatgcagagaaagagctggtgcagtctctgaaagagtacatccttgtggaggaagccaagctttccaagattaagagctgggccaacaaaatggaagccttgactagcaagtcagctgctgatgctgagggctacctggctcaccctgtgaatgcctacaaactggtgaagcggctaaacacagactggcctgcgctggaggaccttgtcctgcaggactcagctgcaggttttatcgccaacctctctgtgcagcggcagttcttccccactgatgaggacgagataggagctgccaaagccctgatgagacttcaggacacatacaggctggacccaggcacaatttccagaggggaacttccaggaaccaagtaccaggcaatgctgagtgtggatgactgctttgggatgggccgctcggcctacaatgaaggggactattatcatacggtgttgtggatggagcaggtgctaaagcagcttgatgccggggaggaggccaccacaaccaagtcacaggtgctggactacctcagctatgctgtcttccagttgggtgatctgcaccgtgccctggagctcacccgccgcctgctctcccttgacccaagccacgaacgagctggagggaatctgcggtactttgagcagttattggaggaagagagagaaaaaacgttaacaaatcagacagaagctgagctagcaaccccagaaggcatctatgagaggcctgtggactacctgcctgagagggatgtttacgagagcctctgtcgtggggagggtgtcaaactgacaccccgtagacagaagaggcttttctgtaggtaccaccatggcaacagggccccacagctgctcattgcccccttcaaagaggaggacgagtgggacagcccgcacatcgtcaggtactacgatgtcatgtctgatgaggaaatcgagaggatcaaggagatcgcaaaacctaaacttgcacgagccaccgttcgtgatcccaagacaggagtcctcactgtcgccagctaccgggtttccaaaagctcctggctagaggaagatgatgaccctgttgtggcccgagtaaatcgtcggatgcagcatatcacagggttaacagtaaagactgcagaattgttacaggttgcaaattatggagtgggaggacagtatgaaccgcacttcgacttctctaggcgaccttttgacagcggcctcaaaacagaggggaataggttagcgacgtttcttaactacatgagtgatgtagaagctggtggtgccaccgtcttccctgatctgggggctgcaatttggcctaagaagggtacagctgtgttctggtacaacctcttgcggagcggggaaggtgactaccgaacaagacatgctgcctgccctgtgcttgtgggctgcaagtgggtctccaataagtggttccatgaacgaggacaggagttcttgagaccttgtggatcaacagaagttgactgacatccttttctgtccttccccttcctggtccttcagcccatgtcaacgtgacagacacctttgtatgttcctttgtatgttcctatcaggctgatttttggagaaatgaatgtttgtctggagcagagggagaccatactagggcgactcctgtgtgactgaagtcccagcccttccattcagcctgtgccatccctggccccaaggctaggatcaaagtggctgcagcagagttagctgtctagcgcctagcaaggtgcctttgtacctcaggtgttttaggtgtgagatgtttcagtgaaccaaagttctgataccttgtttacatgtttgtttttatggcatttctatctattgtggctttaccaaaaaataaaatgtccctaccagaagccttaaaaaaaaaaaaaaaaaa

SEQ ID NO: 53 - DNA, 1183 bp, Homo sapiens
ggcacgagacaccgtgtcctcttgcctgggagaggggaagcagatctgaggacatctctgtgccaggccagaaaccgcccacctgcagttccttctccgggatggacgtggggcccagctccctgccccaccttgggctgaagctgctgctgctcctgctgctgctgcccctcaggggccaagccaacacaggctgctacgggatcccagggatgcccggcctgcctggggcaccagggaaggatgggtacgacggactgccggggcccaagggggagccaggaatcccagccattcccgggatccgaggacccaaagggcagaagggagaacccggcttacccggccatcctgggaaaaatggccccatgggaccccctgggatgccaggggtgcccggccccatgggcatccctggagagccaggtgaggagggcagatacaagcagaaattccagtcagtgttcacggtcactcggcagacccaccagccccctgcacccaacagcctgatcagattcaacgcggtcctcaccaacccgcagggagattatgacacgagcactggcaagttcacctgcaaagtccccggcctctactactttgtctaccacgcgtcgcatacagccaacctgtgcgtgctgctgtaccgcagcggcgtcaaagtggtcaccttctgtggccacacgtccaaaaccaatcaggtcaactcgggcggtgtgctgctgaggttgcaggtgggcgaggaggtgtggctggctgtcaatgactactacgacatggtgggcatccagggctctgacagcgtcttctccggcttcctgctcttccccgactagggcgggcagatgcgctcgagacccacgggccttccacctccctcagcttcctgcatggacccaccttactggccagtctgcatccttgcctagaccattctcccctccagggagcccaccctgacccacccccactgcaccccctccccatgggttctctccttcctctgaacttctttaggagtcactgcttgtgtggttcctgggacacttaaccaatgccttctggtactgccattcttttttttttttttcaagtattggaaggggtggggagatatataaataaatcatgaaatcaataaaaaaaaaaaaaaaaaaaaaaaaaaaaaaaaaaaaaaaaa

SEQ ID NO: 54 - DNA, 1042 bp, Homo sapiens
tcgacccacgcgtccgggcgagcgccgcacatgcgccggggtcgggccgggccgggccgggccgggggcgcgcgctctgcgagctggatgtccaggctgcgggcgctgctgggcctcgggctgctggttgcgggctcgcgcctgccgcggatcaaaagccagaccatcgcctgtcgctcgggacccacctggtggggaccgcagcggctgaactcgggtggccgctgggactcagaggtcatggcgagcacggtggtgaagtacctgagccaggaggaggcccaggccgtggaccaggagctatttaacgaataccagttcagcgtggaccaacttatggaactggccgggctgagctgtgctacagccatcgccaaggcatatccccccacgtccatgtccaggagcccccctactgtcctggtcatctgtggcccggggaataatggaggagatggtctggtctgtgctcgacacctcaaactctttggctacgagccaaccatctattaccccaaaaggcctaacaagcccctcttcactgcattggtgacccagtgtcagaaaatggacatccctttccttggggaaatgcccgcagagcccatgacgattgatgaactgtatgagctggtggtggatgccatctttggcttcagcttcaagggcgatgttcgggaaccgttccacagcatcctgagtgtcctgaagggactcactgtgcccattgccagcatcgacattccctcaggatgggacgtggagaagggaaatgctggagggatccagccagacttgctcatctccctcacagcccccaaaaaatctgcaacccagtttaccggtcgctaccattacctggggggtcgttttgtgccacctgctctggaaaagaagtaccagctgaacctgccaccctaccctgacactgagtgtgtctatcgtctgcagtgagggaaggtgggtgggtattctccccaataaagacttagagcccctccaaaaaaaaaaaaaaaaaaaaaaaaaaaaaaaaaaaaagggc

SEQ ID NO: 55 - DNA, 2894 bp, Homo sapiens
  misc_feature (12)..(12): n equals a,t,g, or c
  misc_feature (26)..(26): n equals a,t,g, or c
  misc_feature (31)..(31): n equals a,t,g, or c
  misc_feature (2894)..(2894): n equals a,t,g, or c
agaggcggatanttttaatcttcatntttcnctttctgtttaagggaccagcccccaatcacaacaactatgcattctgaagcaaagaaaggatcaaaatttgatactgggagctttgttggtggtattgtattaacgctgggagttttatctattctttacattggatgcaaaatgtattactcaagaagaggcattcggtatcgaaccatagatgaacatgatgccatcatttaaggaaatccatggaccaaggatggaatacagattgatgctgccctatcaattaattttggtttattaatagtttaaaacaatattctctttttgaaaatagtataaacaggccatgcatataatgtacagtgtattacgtaaatatgtaaagattcttcaaggtaacaagggtttgggttttgaaataaacatctggatcttatagaccgttcatacaatggttttagcaagttcatagtaagacaaacaagtcctatctttttttttttggctggggtgggggcattggtcacatatgaccagtaattgaaagacgtcatcactgaaagacagaatgccatctgggcatacaaataagaagtttgtcacagcactcaggattttgggtatcttttgtagctcacataaagaacttcagtgcttttcagagctggatatatcttaattactaatgccacacagaaattatacaatcaaactagatctgaagcataatttaagaaaaacatcaacattttttgtgctttaaactgtagtagttggtctagaaacaaaatactccaagaaaaagaaaattttcaaataaaacccaaaataatagctttgcttagccctgttagggatccattggagcattaaggagcacatatttttattaacttcttttgagctttcaatgttgatgtaatttttgttctctgtgtaatttaggtaaactgcagtgtttaacataataatgttttaaagacttagttgtcagtattaaataatcctggcattatagggaaaaaacctcctagaagttagattatttgctactgtgagaatattgtcaccactggaagttactttagttcatttaattttaattttatattttgtgaatattttaagaactgtagagctgctttcaatatctagaaatttttaattgagtgtaaacacacctaactttaagaaaaagaaccgcttgtatgattttcaaaagaacatttagaattctatagagtcaaaactatagcgtaatgctgtgtttattaagccagggattgtgggacttcccccaggcaactaaacctgcaggatgaaaatgctatattttctttcatgcactgtcgatattactcagatttggggaaatgacatttttatactaaaacaaacaccaaaatattttagaataaattcttagaaagttttgagaggaatttttagagaggacatttcctccttcctgatttggatattccctcaaatccctcctcttactccatgctgaaggagaagtactctcagatgcattatgttaatggagagaaaaagcacagtattgtagagacaccaatattagctaatgtattttggagtgttttccattttacagtttatattccagcactcaaaactcagggtcaagttttaacaaaagaggtatgtagtcacagtaaatactaagatggcatttctatctcagagggccaaagtgaatcacaccagtttctgaaggtcctaaaaatagctcagatgtcctaatgaacatgcacctacatttaataggagtacaataaaactgttgtcagcttttgttttacagagaacgctagatattaagaattttgaaatggatcatttctacttgctgtgcattttaaccaataatctgatgaatatagaaaaaaatgatccaaaatatggatatgattggatgtatgtaacacatacatggagtatggaggaaattttctgaaaaatacatttagattagtttagtttgaaggagaggtgggctgatggctgagttgtatgttactaacttggccctgactggttgtgcaaccattgcttcatttctttgcaaaatgtagttaagatatactttattctaatgaaggccttttaaatttgtccactgcattcttggtatttcactacttcaagtcagtcagaacttcgtagaccgacctgaagtttctttttgaatacttgtttctttagcactttgaagatagaaaaaccactttttaagtactaagtcatcatttgccttgaaagtttcctctgcattgggtttgaagtagtttagttatgtctttttctctgtatgtaagtagtataatttgttactttcaaatacccgtactttgaatgtaggtttttttgttgttgttatctataaaaattgagggaaatggttatgcaaaaaaatattttgctttggaccatatttcttaagcataaaaaaaatgctcagttttgcttgcattccttgagaatgtatttatctgaagatcaaaacaaacaatccagatgtataagtactaggcagaagccaattttaaaatttccttgaataatccatgaaaggaataattcaaatacagataaacagagttggcagtatattatagtgataattttgtattttcacaaaaaaaaagttaaactcttcttttctttttattataatgaccagcttttggtatttcattgttaccaagttctatttttagaataaaattgttctccttctaaaaaaaaaaaaaaaaaaaaaaaaaaaaaaaaaaaaaaaaaaaaaaaaaaaaaaaaaaaaaaaaaaaaaaaaaaaaaaaaaaaaaaaaaaaaaaaaaaaaaaaaaaaaaaaaaaaaaaaaaattttn

SEQ ID NO: 56 - DNA, 749 bp, Homo sapiens
cccacgcgtccgctcgcttcttccttctggatgggggcccagggggcccaggagagtataaaggcgatgtggagggtgcccggcacaaccagacgcccagtcacaggcgagagccctgggatgcaccggccagaggccatgctgctgctgctcacgcttgccctcctggggggccccacctgggcagggaagatgtatggccctggaggaggcaagtatttcagcaccactgaagactacgaccatgaaatcacagggctgcgggtgtctgtaggtcttctcctggtgaaaagtgtccaggtgaaacttggagactcctgggacgtgaaactgggagccttaggtgggaatacccaggaagtcaccctgcagccaggcgaatacatcacaaaagtctttgtcgccttccaagctttcctccggggtatggtcatgtacaccagcaaggaccgctatttctattttgggaagcttgatggccagatctcctctgcctaccccagccaagaggggcaggtgctggtgggcatctatggccagtatcaactccttggcatcaagagcattggctttgaatggaattatccactagaggagccgaccactgagccaccaataaataaagcttctgcagaaaaaaaaaaaaaaaaaaaaaaaaaaaaaaaaaaaaaaaaaaaaaaaaaaaaaaaaaaaaaaaaaaaaaaaaaaaaaaaaaaaaaaaaaaaaaaaaaaaaaaaaaaaaaaaaaaa

SEQ ID NO: 57 - DNA, 425 bp, Homo sapiens
ccacgcgtccgccaaacttgacgccatgaagatcccggtccttcctgccgtggtgctcctctccctcctggtgctccactctgcccagggagccaccctgggtggtcctgaggaagaaagcaccattgagaattatgcgtcacgacccgaggcgtttaaggctgatgagttcctgaactggcacgccctctttgagtctatcaaaaggaaacttcctttcctcaactgggatgcctttcctaagctgaaaggactgaggagcgcaactcctgatgcccagtgaccatgacctccactggaagagggggctagcgtgagcgctgattctcaacctaccataactctttcctgcctcaggaactccaataaaacattttccatccaacaaaaaaaaaaaaaaaaaaaaaaaaaaaaaaaaaaaaaaa

SEQ ID NO: 58 - DNA, 1307 bp, Homo sapiens
ccacgcgtccgcggggatccgagtttgcagacttcttgtgcgcagctagccgcctcaggtgtttgaaccatgaatcttttactccttttggctgtcctctgcttgggaacagccttagctactccaaaatttgatcaaacctttagtgcagagtggcaccagtggaagtccacgcacagaagactgtatggcacgaatgaggaagagtggaggagagcgatatgggagaagaacatgagaatgatccagctacacaacggggaatacagcaacgggcagcacggcttttccatggagatgaacgcctttggtgacatgaccaatgaggaattcaggcaggtggtgaatggctatcgccaccagaagcacaagaaggggaggctttttcaggaaccgctgatgcttaagatccccaagtctgtggactggagagaaaagggttgtgtgactcctgtgaagaaccagggccagtgcgggtcttgttgggcgtttagcgcatcgggttgcctagaaggacagatgttccttaagaccggcaaactgatctcactgagtgaacagaaccttgtggactgttctcacgctcaaggcaatcagggctgtaacggaggcctgatggattttgctttccagtacattaaggaaaatggaggtctggactcggaggagtcttacccctatgaagcaaaggacggatcttgtaaatacagagccgagttcgctgtggctaatgacacagggttcgtggatatccctcagcaagagaaagccctcatgaaggctgtggcgactgtggggcctatttctgttgctatggacgcaagccatccgtctctccagttctatagttcaggcatctactatgaacccaactgtagcagcaagaacctcgaccatggggttctgttggtgggctatggctatgaaggaacagattcaaataagaataaatattggcttgtcaagaacagctggggaagtgaatggggtatggaaggctacatcaaaatagccaaagaccgggacaaccactgtggacttgccaccgcggccagctatcctgtcgtgaattgatgggtagcggtaatgaggacttatggacactatgtccaaaggaattcagcttaaaactgaccaaacccttattgagtcaaaccatggtacttgaatcattgaggatccaagtcatgatttgaattctgttgccatttttacatgggttaaatgttaccactacttaaaactcctgttataaacagctttataatattgaaaaaaaaaaaaaaaaaaaaaaaaaaaaaaaaaaa

SEQ ID NO: 59 - DNA, 476 bp, Homo sapiens
aacggacgctaacggcctacctccccctcaggtgctcttacagcctgttccaagtgtggcttaatccgtctccaccaccagatctttctccgtggattcctctgctaagaccgctgccatgccagtgacggtaacccgcaccaccatcacaaccaccacgacgtcatcttcgggcctggggtcccccatgatcgtggggtcccctcgggccctgacacagcccctgggtctccttcgcctgctgcagctggtgtctacctgcgtggccttctcgctggtggctagcgtgggcgctggacggggtcatgggcactggtccatgttcacctggtgcttctgcttctccgtgaccctgatcatcctcatcgtggagctgtgcgggctccaggcccgcttccccctgtcttggcgcaacttccccatcaccttcgcctgctatgcggccctcttctgcctctcggcctccatcatctacc

SEQ ID NO: 60 - DNA, 597 bp, Homo sapiens
catgttctgtcctaaaactttttatttcttaatatgccatggaacattccatgttagtctcatacatcttcttcattctttttaattattgcataatatttcacaacataaattatcctaaagtatataagccattgattcctcctattcctgaatatgtcatttcttttcaattttggggggctgttattcttatcacatataatgctacaatgaatgtccttgtttgtgcttctttttgcacatacaagactttgttcttctgtttttggggatagatacctatacgtagatttggtggggcaagagaaactgagatgcaaaaaacctactccacagcatgcaggttttaatggtaaagttgatcaaaaagataataagcttggtaaacttataaactgtgttcttctgaaagcaatttgtgattttatactaaaagccctacaaatgtatcttatcttttgacccagaaaatgtgcctctaggaataatcagagatctttgtgaagacacctctctataaagatattcatagctattctatttgtaatagtaataaatatttcgatattcagaaaaaaaaaaaaaaaaaaaaag

SEQ ID NO: 61 - DNA, 1594 bp, Homo sapiens
tcgacccacgcgtccgagtgattgtagcattcgttgttgcctttcataatctcagtgattctacaaatcaacaatccgtgggtaaaatggaaaaaggcacagttgacctgaaaccagaaactgcctacaacttaatacataccattctgtttggattcttggcattgagtacaatgagaatgaagtacctctggacgtcacacatgtgtgtgttcgcatcattcggcctatgtagccctgaaatatgggagttacttctgaagtcagtccatctttataacccaaagaggttctggccaggaatgatggatgaactctccgagttgagagaattctatgatccagatacagtggagctgatgaactggattaactctaacactccaagaaaggctgtgtttgcgggaagcatgcagttgctggccggagtcaagctgtgcacgggaaggaccctaaccaaccacccgcactatgaagacagcagcctgagagagcggaccagagcggtttatcagatatatgccaagagggcaccagaggaagtgcatgccctcctaaggtccttcggcactgactacgtaatcctggaagacagcatctgctacgagcggaggcaccgccggggctgccgactccgggacctgctggacattgccaacggccacatgatggatggcccaggagagaatgatcctgatttgaaacctgcagaccaccctcgcttctgtgaagagatcaaaagaaacctgcctccctacgtggcctacttcaccagagtgttccagaacaaaaccttccacgtttacaagctgtccagaaacaagtagcgcagatttctgcccagtgtctatttttgatacggagaaactgcatcatgatgaaactcaatagatgacgtttcctatgtaagtaggtagcccaaaccttcaagctgtgatatgagtaagttctacagatgtttacacaagtgttgccatctttgaaagcatcttctacaagcagaagtctttttcgttgtgtgtctatctttctcattaatgttctttagcctaaatgttaacaactttctaagagtgacctagaattatgttgttggagagaatgatgtgtgttccatggatacctggataggcacataacatgttggaagatgagcacctgctcaggatttgaaatacgtttaattttcaggtgacttaagacagctatgattgaatcaactagagatgatgatcgacttatttaatatgatttcactggtgaagaccaattggtagctttttaaaaagcactttagtgtcctgttttaccttaaaatgttataatattttccagttgtcatgctgtcaacattaacaaaaaaaatcatgttaaggctttgtatcaaacattttgttacactctgtctgaaatgtaatgtggagtacttcagcagtatgtgtcatgtattgtgtgtgtctgtgtgtgtgcatgtgcacacatgtgttttaatgctgggcacagaaaagtgttacaagttccatatcgtaagtccttaaaggggcagaaatatatgtagccaagtagaatttaaaaaaaaaaaaaaagggcggcc

SEQ ID NO: 62 - DNA, 1202 bp, Homo sapiens
  misc_feature (750)..(750): n equals a,t,g, or c
ccacgcgtccgtgatttggggcttatatgtcaggcctttggtttgcgtcttattttaggggttgtttgggggcctgggtggtcggcctcacatgggaaggggatgggtagtggatggggtttctgttgtatcttgtgggcgggtgattttgcttttgtttttgtttcacattcttccccctccacaagccaaagtcgtttcatttggtttccactgtgtggactgtgctggagcttggcgcctgccagaaaaatttggggctaggcaagccccaggttgcagacatggtgaagcagagaaactgttcttctggttcctgcacaacctcagaggggcaaaaaccctccccaggaaggaggagggtgttcaggagccagacttttggagagaaggcagctcccagcctgctgggtgaccgccattctgcgtgtgttccccagctgggcagggctggaagccttacgtatgaagcatggagaagcagccattgtccccactatgggcagaggggggacccggctggccccttgggtcatactggagccaacaccgccagccaccccctctggcctgctggcaatgccacaggtgcccaagaagatggaggatccctgtgccaggagccaacctggtcttcccgagggtcagtgccccagtgaagacagaagcgagagaataaagttccctgtaggtcctctgtcaaaaaaaaaaaaaaaaaaaaaaaaaaaaaaaaaaaaaaaaaaaaaaaanaaaaaaaaaaaaaaaacaaaaaaaaaaaaaaaaaaaaaaaaagggcggccgctctaaaggatccaagcttacgtacgcgggcatgcgaggtcatagtttttctataggggcacctaaattcaattccctggccgcggttttacaacgtggggactggaaaaaccctggggttccccaacttaatcgccttgcagaacatccccctttcgccagctggggtaatagcgaaaaggcccgaaccgtacgcccttcccaacagttgcccaccttgaatgggaaatgggaccccccctgtaccggcccattaaccgccggggtgggggtgcgtacccccaggtgacccccaccctggcacccccttacgcgccgctccttccgctgcgcctttcctgtagccccggtgccccgcttttcccccgtcccctctaattcggcgccttccctttacgtca

SEQ ID NO: 63 - DNA, 894 bp, Homo sapiens
tcgacccacgcgtccggtcagactctgcggtggtggtgactgggggggactcaggggagagccagagcccctgctactgccacatgtttgcaccctctgactatcggaccatgatcatcagcaccatcggtgaaattgctttgaatcctttaaatatactgggcatcaatttcctgggaagacggctgagcctttctattaccatgggatgcacggctttattctgccttctcctcaacatttgcacttcaagtgccggcctgattggcttcctcttcatgctgagggctctggtagctgcaaacttcaacaccgtctacatttacacagctgaggtctaccccaccacgatgcgcgctttggggatgggaaccagcggctccctgtgtcgcattggtgcaatggtggcaccatttatatcccaggttcttatgagtgcatcaatactgggggccctgtgtctcttctcatctgtctgtgttgtatgcgccatttctgcattcactctccccatcgaaaccaaaggacgggccctccagcaaattaaatgaagacctgcaaagctatgtctaccagatgagaaaaatgaattctatcttcagaactgcggtgcatttttttaaaacttggttttacttctgtatgctactcggtaattagtaaagtgatttttttttaaaaggcatatatgggaatggggtaggtaactgtatattgatctcttccttgaggaacaatatataaagtacttttataaaatataatttaagctttcaaaggggtgtgagagggagatggtgggggggaagatggcttttcttcgttgaaatcaagtctgtaaacctttatatgaataaatactaaattttaaacttaaaaaaaaaaaaaaagggc

SEQ ID NO: 64 - DNA, 972 bp, Homo sapiens
ccacgcgtccgggaaaagagactgatcgctgaatatggaatgccatccacccacgccatggcggccactgccattgccttcaccctccttatctctactatggacagataccagtatccatttgtgttgggactggtgatggccgtggtgttttccaccttggtgtgtctcagcaggctctacactgggatgcatacggtcctggatgtgctgggtggcgtcctgatcaccgcactcctcatcgtcctcacctaccctgcctggaccttcatcgactgcctggactcggccagccccctcttccccgtgtgtgtcatagttgtgccattcttcctgtgttacaattaccctgtttctgattactacagcccaacccgggcggacaccaccaccattctggctgccggggctggagtgaccataggattctggatcaaccatttcttccagcttgtatccaagcccgctgaatctctccctgttattcagaacatcccaccgctcaccacctacatgttagttttgggtctgaccaaatttgcagtgggaattgtgttgatcctcttggttcgtcagcttgtacaaaatctctcactgcaagtattatactcatggttcaaggtggtcaccaggaacaaggaggccaggcggagactggagattgaagtgccttacaagtttgttacctacacatctgttggcatctgcgctacaacctttgtgccgatgcttcacaggtttctgggattaccctgagtctcaaacagttggaaactagcccactggacatgaaagccaagacataggaaagttattggtaggcaaatcttgacaacttatttttctttaacaacaacaaaaagtcatacggctgtcttgctactaccagataaatgatgctgctgtgtgaaaggaaaaaaaaaaaaaaaaaaaaaaaaaaaaaaaaaaaaaaaaaaaaaaaaaaaaaaaaaa

SEQ ID NO: 65 - DNA, 726 bp, Homo sapiens
  misc_feature (627)..(627): n equals a,t,g, or c
gagcctgcagccccgggtcgcgtccctccctgagcgcccccgtcggcggccatgctgccccgagggcgcccccgggcgctgggggccgccgcgctgttgctgctgctgcwgcwgctyggattcctcckgttcggtggggacctggggtgtgagcgccgcgagcctggcgggcgagcgggggccccgggatgcttccccggcccgctcatgccacgtgtccccccagacgggaggctgcggagagccgccgccctcgacggagacccgggggccggccccggggaccacaaccgctccgactgcggcccgcagccgccgccgccgcccaagtgcgaggtaggtgcgcgcggccctggcggcgggagtcctgggggcgccgcccccgagccckttctcttggacatctgcgggaatcacagtacctggcgtctgtccagcactggccagccggctggggcgcacctcgaacgtgcagctcctctgctcccgacctcatttccccatttgaaatgaagggttggctcctgctgccccctccgcacactgttccgggctctgctgcggggtggggcagctcaacatgggtcctcaccgcctagcggagaaggggggctgctgccgacctgngcgcccctccccagctcttgcatgtggccatcgtgtgtgcggggcataactccagccgagacgtcatcaccctggtgaagcccatgctcttctacaggt

SEQ ID NO: 66 - DNA, 1753 bp, Homo sapiens
ggcacgagtccagctttgttcggttgcttgtgaggagctatgatcctttggaggagaagacacactctggtttttagactttttagcttttttgctctggtttctccccatctttgtgattttatctacctttggtctttgatgatggtgacctacagatggggttttggtgtggatatcctttttgtggatgttgatgctattcctttctgtttgttagttttccttctaacagtcaggtccctcagtggcaggtctgttggagttgctggaggtccactcccgacactgtttgcctgggtatcaccagtggaggctgcagaacagcaaatattgtagaacagaatagattgctgcctgatcccttccccggaagctttgtcccataggtgcaacctgctgtatgaggtgtctgttggcccctacttggaggtgtctcctagttaggcctacatggggctcagggacccacttgaggaggcagtctgtccattctgagaactcaaacaccatgctgggagaaccactgctctcttcagagctgtcaggcagggacgtttaggtctgcagaagtttccattgcctcttgttcagctatgccctgcccacagaggcggagtctgtagaggctgtaggccttgctgagctgtggttagctccgcccagtttgagcttcttggctgctttgtgtacctactcaagcctcagcaatggtggacacccctccccccgccagactgctgcctcgcaggtcaatctcagactgctgcactagcagtgaggaaggctctgtggaagtgggacccaccaagccaggcatgggagagtatttcctggtctactggttgctgagaccatgggagaagtgcagtatttgggcagggagtgtcccgtttttccaggtatggtctgtcacatcttttcttagctaggaaagggaaatccccccaccccttgcacttccttggtgaggcgacaccccaccttgtttcaccttgccctccatgggctgcactcactgtccaaccagtcccaatgagatgaaccaggtacctcagctggaaatgcagaaatcacccgtcttctgcatcaatcacgctgggatctctagaccggagctgttcctatttggccatcttggaatggacaatatttgtttaaaatttttagttaagcttcctctatccaactctttccaagtacaacacaactggtgaatatgcataaacaagctaattgtttataactgaagctgttttccatccaattgccaggcagacaatttaatctggtaatacttataaagtgttccctgtgtggcaagaattgtgtttttataaggctaactagaataaacagtgtagagaagaccttaaatgagctgatggagctgaaaaccatggcaagagaacttcgtgatgcatgcacaaacttcaatagctgattcaatcaagtggaagaaaggatattggtgattgaagatcaaattagagaaataaagcaagaaaagaagtttagagaaaaagagtaaaaagaaatgaatgaagcctccaagaaatatggaactatgtgaaacgaccaaatctacatttgattggtgtacctgaaagtgatggggagaatggaacaaagttggaaaacacttttcagggtattatccaggagaacttccccaatctagcaaggcaggcaaacattcaaattcaggaaatacagagaacgccacaaagatactcctcgagggggggcccgg

SEQ ID NO: 67 - DNA, 1079 bp, Homo sapiens
  misc_feature (1021)..(1021): n equals a,t,g, or c
  misc_feature (1024)..(1024): n equals a,t,g, or c
ttctttttgggctggggtcgctggcggctgcaggctctgggcatattgcctgctgcccacggtttcaaagctgccagcactcgctgggctccgcctgctgcccccccgggggtcacaggccacatggcttggtggccgaactccacgtgctggctcctcacagctgtcaccatggccttggctacccgctgcgtccctcaggagctgccatcaggttctgaggtgcctggtctggaggcagtccaggtggtgaggtctggactggctggaccccaccgatgctcctgccgtcaccccgtcctggccctcactggaggcagggacactcaggggcccggggcctcggggccagtgctgcagtggccgccgttgctctcacagcgggtccaggcctggcttctgaaggcaatgtgcctgcgtctcacactcaaaagggcctgccaggctgcacctggcggcagctcccacgggggacgatgtcctgctgtctgttggcccccaggtgggagggacgggcgtggagctgcaggcagtgggcaaggccatggcaggtggccaggcctgggaaccagcctccaggtggcatccacgctgaggcctgagctccggccgacaaggactggggatgcaggggattagccaggggctgtgtgggggagccctggagccctgtctgcgagttaccccgatgaacagggagacgcggcagaggcagggccggggaggggccgtgtgggggagccctggagccctgtctgcgagttaccctgatggacagagagacgcggcaaaggcagggccggggaggggccgtgtggggcctggtggtcggcagaggaagggtctgtgctcctcctgcgtgtggtggcaccggagcgcctmccagttcctggtgytaccgcaccagccgcctcccagtgagcatctccacgtgtgccgacamcagctttgttgaggtagaacttaccakactcacctgttaaaagagtgcagtttggtcactcttagtggtttgtagagntgngcagccgtcattgcaatccagcgttgcagcattccacagcccacaggtaccccca

SEQ ID NO: 68 - DNA, 507 bp, Homo sapiens
gggtgcgcacgaggccctgtattcagtccccggggagcactgccttacgctccagaagcgcaaaggcttcgtgcgcctggcgctgaggcacgggctcctggcagcattggtgccagctcaccttcaagaagctcatgggcttctctccttgcatcttctggggtcgcggtctcttctcagccacctcctggggcctgctgccctttgctgtgcccatcaccactgtggtgggccgccccatccccgtcccccagcgcctccaccccaccgaggaggaagtcaatcactatcacgccctctacatgacggccctggagcagctcttcgaggagcacaaggaaagctgtggggtccccgcttccacctgcctcaccttcatctaggcctggccgcggcctttcgctgagcccctgagcccaaggcactgagacctccacccactgtggactccatgcctccaataaaaggtagttctgggcccaaaaaaaaaaaaaaaaaaaaaaaaag

SEQ ID NO: 69 - DNA, 580 bp, Homo sapiens
cgcagaaccaggaaagtaacggctacagacagtgagaaatagtttcgctcgccggctagaaaaactctgtcggtaccaaccccagagcgttgagagcagcccacctccacgcttccttaacggagaggtgcaggactcagacttcaccagcccactcggtcccagccttgtacgcaaagagacgccaaggacgcgctctcccgcgtccaggcagccccagcttgctggcttgcctgcccgcctgcgtgcagcactcggccggcgtgcagcatgaccctgtggaacggcgtactgcctttttacccccagccccggcatgccgcaggcttcagcgttccactgctcatcgttattctagtgtttttggctctagcagcaagcttcctgctcatcttgccggggatccgtggccactcggagtatctgcattcccacctcctcccctcggagatcaggctggggcctccctcttctgagggaggtgacccctgcgtgcctagcacttctggactcactgagcctcaccaagcagtgactggaccaggaggcagaaccaggaccaggcgccagacagctaggg

SEQ ID NO: 70 - DNA, 1386 bp, Homo sapiens
tcgacccacgcgtccggcttcactccaccatgaccagagcacctctcctgctactatgtgttgccctggtgctgcttgggcatgtgaatggagccacagtaagaaatgaggacaaatggaagccactcaacaaccccagaaacagagatctgtttttcagaaggcttcaggcatattttaagggcagaggtcttgatcttggaacatttccaaatcctttccccacgaatgaaaatcctagacctctctctttccagtcagaacttactgcttctgcatctgcagattatgaagagcagaaaaactcctttcacaattatctcaaaggctgaaagtttcttctgagctcaggtgtctggctattttaaaactacagatgaagcttctcattagaaaaattcaaccattgtcatagctaaactttcatggagtttctttccccctcacttttatttttcagtttgtaatgattttattccacatttccatatttacatataaatcgctggaactatgatttctatgcatatttatggagtttttttcctatgaaaccataaatattgatgtagagcaccgcatgtatttgtaggagttacaaaaacatcacaaactgaaaaaagattataatctaaattagatgtttctttaagcttgtttttaaaacttgtcttttatgtttattatcttttatcgaccaatatatttttttaaagggacatgctcacttttagtatagtaaaattcattatatgtgatagagggttgggtttaaaatttgtcttcctttcctaaaaagaagatgcattcccatgttcagcatacactaccaaaatacttcacagttttagtttcataagaaatgagggcaagtgataaacagccacaattaagttaaaatggaagcaaacaacaacaacaaacatgggattctagaagttgtcaacgcctccaaagatgctctttgccagagtattcagaggtggacattgtgccacatcaaatattctagcaatgcccgagcccttgctctcatacacaacctcctcaggaaggaaaagtagaaacaggtgatttcctctctttccaaccagcccctgctctccttactctagctcatgctgagttattctgattcccatactcacatttggaatagctgcttttcctgtatctttatagatagctgcatcatcttctctgtgattcctgcaaaaggaatgttgcactaaaatgcaacattgtcctaacattagtctgtgcatttcaaaatattttaatgtggcttttttgggtggattattgatattgtatatgaagaataaaatatttgtgcaagaacaaaaaaaaaaaaaaaaaaaaaaaaaaaaaaaaaaaaaaaagggc

SEQ ID NO: 71 - DNA, 813 bp, Homo sapiens
  misc_feature (22)..(22): n equals a,t,g, or c
gtccccgctcagatccaggccncgaatgggctgggcgggttgcagaagccatcacctgagctacccagggtgggatccctggccccgacctctgtcctgacacgccccaagcggcagcaacaaagccccaattggcctgggcctgggcaggaggagctgggccgggtgccagatactgggatcagccactgcagctccctgagcactctctacagagacgcggaccccagacatgaggaggctcctcctggtcaccagcctggtggttgtgctgctgtgggaggcaggtgcagtcccagcacccaaggtccctatcaagatgcaagtcaaacactggccctcagagcaggacccagagaaggcctggggcgcccgtgtggtggagcctccggagaaggacgaccagctggtggtgctgttccctgtccagaagccgaaactcttgaccaccgaggagaagccacgaggtcagggcaggggccccatccttccaggcaccaaggcctggatggagaccgaggacaccctgggccgtgtcctgagtcccgagcccgaccatgacagcctgtaccaccctccgcctgaggaggaccagggcgaggagaggccccggttgtgggtgatgccaaatcaccaggtgctcctgggaccggaggaagaccaagaccacatctaccacccccagtagggctccaggggccatcactgcccccgccctgtcccaaggcccaggctgttgggactgggaccctccctaccctgccccagctagacaaataaaccccagcaggccgggmaaaaaaaaaaaaaaaa

SEQ ID NO: 72 - DNA, 757 bp, Homo sapiens
  misc_feature (5)..(6): n equals a,t,g, or c
  misc_feature (684)..(684): n equals a,t,g, or c
  misc_feature (734)..(734): n equals a,t,g, or c
ttttnncaaaaaagcttatttttaggttgacacttattagaagttacgccttgcaggttaccggttccggaatycccgggkcgaaccccaaggrrttcgcggaccccagacatgaggaggctcctcctggtcaccagcctggtggttgtgctgctgtgggaggcaggtgcagtcccagcacccaaggtccctatcaagatgcaagtcaaacactggccctcagagcaggacccagagaaggcctggggcgcccgtgtggtggagcctccggagaaggacgaccagctggtggtgctgttccctgtccagaagccgaaactcttgaccaccgaggagaagccacgaggcaccaaggcctggatggagaccgaggacaccctgggccgtgtcctgagtcccgagcccgaccatgacagcctgtaccaccctccgcctgaggaggaccagggcgaggagaggccccggttgtgggtgatgccaaatcaccaggtgctcctgggaccggaggaagaccaagaccacatctaccacccccagtagggctccaggggccatcactgcccccgccctgtcccaaggcccaggctgttgggactgggaccctccctaccctgccccagctagacaaataaaccccagcaggccgggcgcggtgctmacttgtatccagactttagagccagnagcgatactaatagagtcaacagctgcactgtaaccgttcaaatcaatancgaaaaaaaactagggccgccat

SEQ ID NO: 73 - DNA, 1734 bp, Homo sapiens
ggcacgagaggctgtgaggggcgggagcgctgctggaacccgagccggagccggagccacagcggggagggtggcctggcggcctggagccggacgtgtccggggcgtccccgcagaccggggcagcaggtcgtccgggggcccaccatgctggtgactgcctaccttgcttttgtaggcctcctggcctcctgcctggggctggaactgtcaagatgccgggctaaaccccctggaagggcctgcagcaatccctccttccttcggtttcaactggacttctatcaggtctacttcctggccctggcagctgattggcttcaggccccctacctctataaactctaccagcattactacttcctggaaggtcaaattgccatcctctatgtctgtggccttgcctctacagtcctctttggcctagtggcctcctcccttgtggattggctgggtcgcaagaattcttgtgtcctcttctccctgacttactcactatgctgcttaaccaaactctctcaagactactttgtgctgctagtggggcgagcacttggtgggctgtccacagccctgctcttctcagccttcgaggcctggtatatccatgagcacgtggaacggcatgacttccctgctgagtggatcccagctacctttgctcgagctgccttctggaaccatgtgctggctgtagtggcaggtgtggcagctgaggctgtagccagctggatagggctggggcctgtagcgccctttgtggctgccatccctctcctggctctggcaggggccttggcccttcgaaactggggggagaactatgaccggcagcgtgccttctcaaggacctgtgctggaggcctgcgctgcctcctgtcggaccgccgcgtgctgctgttgggcaccatacaagctctatttgagagtgtcatcttcatctttgtcttcctctggacacctgtgctggacccacacggggcccctctgggcattatcttctccagcttcatggcagccagcctgcttggctcttccctgtaccgtatcgccacctccaagaggtaccaccttcagcccatgcacctgctgtcccttgctgtgctcatcgtcgtcttctctctcttcatgttgactttctctaccagcccaggccaggagagtccggtggagtccttcatagcctttctacttattgagttggcttgtggattatactttcccagcatgagcttcctacggagaaaggtgatccctgagacagagcaggctggtgtactcaactggttccgggtacctctgcactcactggcttgcctagggctccttgtcctccatgacagtgatcgaaaaacaggcactcggaatatgttcagcatttgctctgctgtcatggtgatggctctgctggcagtggtgggactcttcaccgtggtaaggcatgatgctgagctgcgggtaccttcacctactgaggagccctatgcccctgagctgtaaccccactccaggacaagatagctgggacagactcttgaattccagctatccgggattgtacagatctctctgtgactgactttgtgactgtcctgtggtttctcctgccattgctttgtgtttgggaggacatgatgggggtgatggactggaaagaaggtgccaaaagttccctctgtgttactcccatttagaaaataaacacttttaaatgataaaaaaaaaaaaaaaaaa

SEQ ID NO: 74 - DNA, 1743 bp, Homo sapiens
caaggtttgaacgagcagcgccgcaggcgcgctcctcggtgccgtgagcgcgccccggggccggccggtctgctcgggagcgcgccccgtggcccagccctgtctccttttagcataggggcttcggcgccagcggccagcgctagtcggtctggtaaggcaaagcggagcggagatcctcaaacggcctagtgcttcgcgcttccggagaaaatcagcggtctaattaattcctctggtttgttgaagcagttaccaagaatcttcaaccctttcccacaaaagctaattgagtacacgttcctgttgagtacacgttcctgttgatttacaaaaggtgcaggtatgagcaggtctgaagactaacattttgtgaagtaaaacagaaaacctgttagaaatgtggtggtttcagcaaggcctcagtttccttccttcagcccttgtaatttggacatctgctgctttcatattttcatacattactgcagtaacactccaccatatagacccggctttaccttatatcagtgacactggtacagtagctccagaaaaatgcttatttggggcaatgctaaatattgcggcagttttatgcattgctaccatttatgttcgttataagcaagttcatgctctgagtcctgaagagaacgttatcatcaaattaaacaaggctggccttgtacttggaatactgagttgtttaggactttctattgtggcaaacttccagaaaacaaccctttttgctgcacatgtaagtggagctgtgcttacctttggtatgggctcattatatatgtttgttcagaccatcctttcctaccaaatgcagcccaaaatccatggcaaacaagtcttctggatcagactgttgttggttatctggtgtggagtaagtgcacttagcatgctgacttgctcatcagttttgcacagtggcaattttgggactgatttagaacagaaactccattggaaccccgaggacaaaggttatgtgcttcacatgatcactactgcagcagaatggtctatgtcattttccttctttggttttttcctgacttacattcgtgattttcagaaaatttctttacgggtggaagccaatttacatggattaaccctctatgacactgcaccttgccctattaacaatgaacgaacacggctactttccagagatatttgatgaaaggataaaatatttctgtaatgattatgattctcagggattggggaaaggttcacagaagttgcttattcttctctgaaattttcaaccacttaatcaaggctgacagtaacactgatgaatgctgataatcaggaaacatgaaagaagccatttgatagattattctaaaggatatcatcaagaagactattaaaaacacctatgcctatacttttttatctcagaaaataaagtcaaaagactatgatatcatagttttttataccttatttaagagaaacaacctgacgtgcaccaatcagtctgcacatcccaacccttcacattttataaattattgtagatcatgttttgttaggagcacttttatgagagacattttccatgactaaataatcagcattagtcagtaaatcctttagaactgggttttgaaatgggagttttatcatattaaatcatttcttgtagtcttaaaaaaaaaaaaaaaaaaaactcgagggggggcccggtacccaattcgcccgataggagtc

SEQ ID NO: 75 - DNA, 1404 bp, Homo sapiens
  misc_feature (3)..(4): n equals a,t,g, or c
  misc_feature (27)..(27): n equals a,t,g, or c
  misc_feature (53)..(53): n equals a,t,g, or c
  misc_feature (56)..(56): n equals a,t,g, or c
ccnnttccaacttatcgccctaagaantgtcgctcagtccgtcgatccggtcnccncggtcggaagtctgtcytagaacgccctggctggtatgaccacagttcatggcggctcttctcgcttgggtcatggtcatcttccagcacctkctgtgctgggaargccgaggatgggggcccagcactgtccaggcctgctggggcctggctgggagtcctgtgggcagcatggaacatgcagctgggcttcctgtgaccaggcaccctctggcactgttgcttgccctgtgccctggaccttttcctgcccttctccttcctctgctcccttggggctaccccttggcccctcctggtctgtgcaaactccctcagggagcccccctgccctgtagctctcgcttaacttcctaggggctgctgagcccacccagaggttgttggagttcagcggggcagcttgtctcccttgtcagcaggggcgtaagggctgggtttggccatacaaggttggctacgccctcaatccctgaccgttccaggcactgagctgggcacccacggaaggacatgctgtccagactgtgatgactgccagcacagggcatctcgggcttggctggtctgcgaggccttgcccctgtggaactctgggttcctgttttctcagtcttttttgcggctttgctgtggttggcagctgccgtactccaggcttgtgtcggccactcagatgagggctgtggtgcgagccagtgcaggagagctgcgcttgggattgtgccctctcctgtgtctgtcctccggacctacccaggtctccaccatcaggaccctgtctttgggtttagaagaccaagtatggggaaaaccaggcaccagcctctgcagcaatgggtccctctagcctgtggacaccagctgggggatccagggtcaggccccctcctctccccagtttccctctgctgtgggttctgggctgtcatgtctccaccacttaaggatgtctttacactgacttcaggatagatgctgggatgcctgggcatggccacatgttacatgtacagaactttgtctacagcacaaattaagttatataaacacagtgactggtatttaatgctgatctactataaggtattctatatttatatgacttcagagacgcgtatgtaataaaggacgccctccctccagtgtccacatccagttcaccccagagggtcgggcaggttgacatatttatttttgtctattctgtaggcttccatgtccagaatcctgcttaaggttttagggtaccttcagtactttttgcaataaaagtatttcctatccaaaaaaaaaaaaaaaaaactcgagggggggcccggtacccaattcgcccctataaagagtc

SEQ ID NO: 76 - DNA, 1803 bp, Homo sapiens
  misc_feature (1555)..(1555): n equals a,t,g, or c
gtcagtcaccggtccggcaattcccgggtcgacccacgcgtccgcascatgaaggtacggggcccagggtcgggggactcatagcatgggggaactgagcccactccagaggcccctggccacagagggcactatgaaggcacaaggagttctcttgaaactcgcactcctggccctgccgctgctgctgcttctctccacgcccccgtgtgccccccaggtctccgggatccgaggagatgctctggagaggttttgccttcagcaacccctggactgtgacgacatctatgcccagggctaccagtcagacggcgtgtacctcatctacccctcgggccccagtgtgcctgtgcccgtcttctgtgacatgaccaccgagggcgggaagtggacggttttccagaagagattcaatggctcagtaagtttcttccgcggctggaatgactacaagctgggcttcggccgtgctgatggagagtactggctggggctgcagaacatgcacctcctgacactgaagcagaagtatgagctgcgagtggacttggaggactttgagaacaacacggcctatgccaagtacgctgacttctccatctccccgaacgcggtcagcgcagaggaggatggctacaccctctttgtggcaggctttgaggatggcggggcaggtgactccctgtcctaccacagtggccagaagttctctaccttcgaccgggaccaggacctctttgtgcagaactgcgcagctctctcctcaggagccttctggttccgcagctgccactttgccaacctcaatggcttctacctaggtggctcccacctctcttatgccaatggcatcaactgggcccagtggaagggcttctactactccctcaaacgcactgagatgaaaatccgccgggcctgaagggctggccccctcaggcacctttcctcccctggacacccatggtctccatgagtgctccctctgctgcccctgatgcatgcttctgctgattcccgagcaccaactccttacaagggggccttgtggctctcagccatgccacatccctgtcacacacccagggcatccattcctaagccagacccggctcccctacacctgaagttacactgccagcagttccccaggcctcttccgagaggcacatggttctagcctggacctggctgggctccatgagaatgagttgcctccaccctgtcccaacagctgacagccaggagccactctcccagctgcaggcctttgtggtccatcttgtcctgcttcctcactgtggacccctgtctgggccaccctagtgtgctaagctgagcagtgcagtgtgaacagggcccatggtgtattctaggccacagcccagcactcctctgggctgctctcaaaccatgtcccatcttcagcatccctcccaccaacttactcccctgtggtgagtaccgtggaaccccagcccacctcactatcatactcagcttcccctgatggcccatcccagcccctgaagctctatgccaagaacacagntaccgcacaccaccctgaaacagccacagccaaggtaggcatgcatatgaggtcttccccataccctctgggtgttgagaggtttagccacatgagggagcagaggacaatctctgcagggctgggagtgggtagggactgaaggtctcaataaaccttcagaacctgaaaaaaaaaaaaaaaaaaaaaaaaaaaaaaaaaaaaaaaaaaaaaaaaaaaaaaaaaaaaaaaaaaaaaaaagggcggcc

SEQ ID NO: 77 - DNA, 4165 bp, Homo sapiens
cttttgcaaccctctgcattccatctctatgagccaccattggattacacaatgacatggagaatgggaccccgtttcactatgctgttggccatgtggctagtgtgtggatcagaaccccacccccatgccactattagaggcagccacggaggacggaaagtgcctttggtttctccggacagcagtaggccagctcggtttctgaggcacactgggaggtctcgcggaattgagagatccactctggaggaaccaaaccttcagcctctccagagaaggaggagtgtgcccgtgttgagactagctcgcccaacagagccgccagcccgctcggacatcaatggggccgccgtgagacctgagcaaagaccagcagccaggggctctccgcgtgagatgatcagagatgaggggtcctcagctcggtcaagaatgttgcgtttcccttcggggtccagctctcccaacatccttgccagctttgcagggaagaacagagtatggktcatctcagcccctcatgcctcggaaggctactaccgcctcatgatgagcctgctgaaggacgatgtgkactgtgagctggcggagaggcacatccaacagattgtgctcttccaccaggcaggtgaggaaggaggcaaggtgagaaggatcaccagcgagggccagatcctggagcagcccctggaccctagcctcatccctaagctgatgagcttcctgaagctggagaagggcaagtttggcatggtgctgctgaagaagacgctgcaggtggaggagcgctatccatatcccgttaggctggaagccatgtacgaggtcatcgaccaaggccccatccgtaggatcgagaagatcaggcagaagggctttgkccagaaatgtaaggcctctggtgtagagggccaggtggtggcggaggggaatgacggtggagggggagcaggaaggccaagcctgggcagcgagaagaagaaagaggacccaaggagagcacaagtcccaccaaccagagagagtcgggtgaaggtcctgagaaaactggccgccactgcaccagctttgccccaacctccctcaacccccagagccaccacccttcctcctgccccagccacaacagtgactcggtccacgtcccgggcggtaacagttgctgcaagacctatgaccaccactgcctttcccaccacgcagaggccctggaccccctcaccctcccacaggccccctacaaccactgaggtgatcactgccaggagaccctcagtttcagagaatctttaccctccatcccggaaggatcagcacagggagaggccacagacaaccaggaggcccagcaaggccaccagcttggagagcttcacaaatgcccctcccaccaccatctcagaacccagcacaagggctgctggcccaggccgtttccgggacaaccgcatggacaggcgggaacatggccaccgagacccaaatgtggtgccaggtcctcccaagccagcaaaggagaaacctcccaaaaagaaggcccaggacaaaattcttagtaatgagtatgaggagaagtatgacctcagccggcctactgcctctcagctggaggacgagctgcaggtggggaatgttccccttaaaaaagcaaaggagtctaaaaagcatgaaaagcttgagaaaccagagaaggagaagaaaaaaaagatgaagaatgagaacgcagacaagttacttaagagtgaaaagcaaatgaagaagtctgagaaaaagagcaagcaagagaaagagaagagcaagaagaaaaaaggaggtaaaacagaacaggatggctatcagaaacccaccaacaaacacttcacgcagagtcccaagaagtcagtggccgacctgctggggtcctttgaaggcaaacgaagactccttctgatcactgctcccaaggctgagaacaatatgtatgtgcaacaacgtgatgaatatctggaaagtttctgcaagatggctaccaggaaaatctctgtgatcaccatcttcggccctgtcaacaacagcaccatgaaaatcgaccactttcagctagataatgagaagcccatgcgagtggtggatgatgaagacttggtagaccagcgtctcatcagcgagctgaggaaagagtacggaatgacctacaatgacttcttcatggtgctaacagatgtggatctgagagtcaagcaatactatgaggtaccaataacaatgaagtctgtgtttgatctgatcgatactttccagtcccgaatcaaagatatggagaagcagaagaaggagggcattgtttgcaaagaggacaaaaagcagtccctggagaacttcctatccaggttccggtggaggaggaggttgctggtgatctctgctcctaacgatgaagactgggcctattcacagcagctctctgccctcagtggtcaggcgtgcaattttggtctgcgccacataaccattctgaagcttttaggcgttggagaggaagttgggggagtgttagaactgttcccaattaatgggagctctgttgttgagcgagaagacgtaccagcccatttggtgaaagacattcgtaactattttcaagtgagcccggagtacttctccatgcttctagtcggaaaagacggaaatgtcaaatcctggtatccttccccaatgtggtccatggtgattgtgtacgatttaattgattcgatgcaacttcggagacaggaaatggcgattcagcagtcactggggatgcgctgcccagaagatgagtatgcaggctatggttaccatagttaccaccaaggataccaggatggttaccaggatgactaccgtcatcatgagagttatcaccatggatacccttactgagcagaaatatgtaaccttagactcagccagtttcctctgcagctgctaaaactacatgtggccagctccattcttccacactgcgtactacatttcctgcctttttctttcagtgtttttctaagactaaataaatagcaaactttcacctattcatgagttattattgaaacctcaaatcataaagacatttaaaagaattgtttttctaactggaggggctctagtgctaaataatagtactgaaaattgatattattttccttttcttatatgaaggaccttatttggcatataaaattttataaaatatgtatttaaagctttttcttatttttkgtattaattggtaagtgaaaactctgttaaagatcacaccacaatgttttcaagaaacatctgaaaagataaaacaaagaacaaataacttataatacttacttaaattgacactttttgaaatgccagtctgaaaataattaagatatctctgctttgtatgagtttcttttatgaaacttgataccacgggagtccagtaatattggccacaaaagccagagaaagtaccaagcccagctttgttatcatagccacttcctgccctgcttctgttatttttagtgttttttcagatataaatcggggtccaggaaatcctcaccagaatctggcactgcagccaaaggcgatacttccagagttctagtaggctgctatggaatttctggcatgaaaattcttgacccctcacactttaccccctgtacagcacaggcataccatggagatattacaggatcagttccagaccaccataataaagtggatatcgcaataaagtgagtcacacaaaatttttggtttctcagtgcatataaaagttatgtttacactctttagtagtctattaagtgtataatagctttatgtccaaaaaatgtacatgttttattttaaaaatactttattgctaaaaattgctaatgatcataatctttttgcattgatgttgatggctgctgaatgatcagggtggtggttactgaaggttgggggtgatggtggccaatttcttaaaataagacagcaatgaagtttgccacttcgattgactttttcttcatgaaagatttctctgcagcatgtgatgctgtatgatagcattttaccagtagtacaacttcttttgaaattggagccaatcctctcaaaccctgttgctgctttattaatgaaatttatgtaatgttgtaaaaaa

SEQ ID NO: 78 - DNA, 603 bp, Homo sapiens
acttcgtggaggcccctcctccggccacctccctgttcctggctgggccctttgtgagtggggtctgcttgctgctggcgtgtgttttgtgtgtgcctgtgtggggactgtgtgcacgtgtgtgtgtgtgtgtggggatacgaatgtgtgtgcatgtcttacatgtgtgtgcctgtgtgtgcatgtgttgcacgtgtgtgtgtgcacatgtgtgcgtggacatgtgtagctgctttgtgctgtggtctggatgttttttgtgtctaccccagattctcgttgaaatcctaacgccccaggcaatgatgttaggaggcggggcttctgggagatggcaagttcgtgaggctgcagctctgctgggggatcagtgtccttctacaagcggctccagggaggtcccttgccccttccaccatgtgaggacccgagatggtgccgtctatgaaccgggaagtgagtcctctccggacgtggaacaagytggtgccttgattttgaacttgcagcctccagctgctgtctaacaccaccggctcgaccttgagttcctccctgagcaaagccaagcgacctcctggactgagccagttttcgtgcctg

SEQ ID NO: 79 - DNA, 708 bp, Homo sapiens
cccacgcgtccgggtgaacgcgagccttatggcgatcagttctgtggcatcgttcctcctgctcgtttattctttcactcattcactcatgccctgccgcgccatcatttcttcccacattcatttattcgttcatcagtccccagccccgggtagtttcggagctcaccaggctgggctcgcctcccagcctccggagctgcccgcacaggcctcgcgccacctggccgcagcttcctcccctttatctactccgtatttgtttgtccagcctaggccttgggggttgtgggggagacacaagtacccgtgactggtcggacaagtgcccgttgttgggggcgtgggcgctgggactgacgcgggaggtggctctgatcatgtcgaggtgaggaggaggcgttgaggctcagaaagggcacgcagcgtggacgtgaggacgtcggggaggctggagcagtgaggccgacaggaaggaccttacggggctcacatgctatcccacgacgaggacggactcaggacggcagccctkataratkcggctgggggctggcgggtcggggtcgcmcmccmcaggatggaagggcarcggtgcctggctcccccttaaaaaacatgggcccttggggggcccggatttttgattcttcaatacccaaatatggatttttttttaaaaaaaaaaaaaaaaaaaaaaaaaaaaag

SEQ ID NO: 80 - DNA, 2415 bp, Homo sapiens
cgcgagacggaccagctggtggccgtggaggccctcatccatgcctccacgaagctcagccgcgccaccttcatcatcaccaatggagtgtcactgctcaaacagatctacaagaccaccaaaaatgagaagatcaagatccgcacactggtgaccagtgacaagaccatcctgtactcggtggccaccaccctggtgaactgcaccaacagctacgatgtcaaggaggtcatcccagagcttgtccagctcgccaagttctccaagcagcatgtgcccgaggaacaccccaaggacaagaaggactttatagacatgcgggtgaagcggcttctgaaggcgggtgtcatctctgccctggcttgcatggtgaaagcagatagtgccatcctcactgaccagaccaaggagctgctggccagggtattcctggcactgtgtgacaacccaaaggaccgaggcaccattgtggctcaaggtggtggcaaggccctgattcccctggctttggagggcacagatgtgggcaaggtgaaggcagcccacgctctagcaaagatcgctgctgtctccaatccggacattgcttttcctggggagcgggtgtatgaggtggtgcggccccttgtaagactcttggacacacagagggatgggcttcagaactatgaggctctcctaggcctcaccaacctgtctgggcggagtgacaaactccggcagaagatctttaaggagagggccttgccagacatcgagaactacatgtttgagaatcatgatcagctgcggcaggcggccaccgagtgcatgtgcaacatggtgctccayaaggaggtacaggaaaggttcttggctgacgggaatgaccggctgaagctggtggtgctgctctgcggggaggatgatgataaggtgcagaatgcggctgcaggggctctggccatgctgacagcagcacacaagaaactgtgcctcaagatgactcaagtgacaacccagtggttggagatcctccagcggctttgcctgcacgaccagctgtctgtccaacaccggggcctggtcattgcctacaacctactggcagccgatgctgagctggccaagaagctggtggagagtgagctgctggagatcctgactgtggtgggcaaacaggagccagatgagaagaaggcakaagtggwtcakacagcccgagaatgtctcatcaagtgcatggattatggtttcattaaaccagtgtcttagacagcgaccctcagggatgctgggagtggtcctgtactgtgcagagtcctgggttggttgggttctcctgragagtcaggtcatctagggatcatagcagtgacmatgaagtctcaatataaaggaaagacttgawtgktctctgagttgtgagtcttctcctttgtcctgacagagtttggatgtttcactctctctcttgcttcctgtctccttatatttgtcatgtttcagaaattcccagaataattttcacccatgattagaaataggttggatcattctttctgtacccattctgaaggccaggataataggttgaagttctttatattttggaaaatggattttgtggtaaggtaggaactaacgggtgtgtgcatataaaggttaatgctgttgtatttggatgctgatctgtgctgttttcatgacctctctcccacactatttgaatcagtctgttcagaactgtgtgtttcacctgcagtgctctgtcccagtcccatgcccattcccatcacttcactgtgatggaaatagagtttatgttcaacagtggggcatgacctctgcaatttgcttgggaaagtcttccaagcaagatggacatgatgaatacaaataagatctactcaaagtacttcaaacaaaaaataaataattcattggctcatgtatcttggccacccagggaaggtctgacattgttagttagatccagagtttcaaatgtcatcaccatggatgtgtctttttctctctctcatttcccctccccatatcttgtcttttatttattataggtttgtctcattccctggcaggctctctccctgtgataggaaagagagtccccagcagccccagggtgacatagttgttatagttcattatggaatagaagagagaagagcattctcaataacccggcaaagttcccagggatgactctgatatgtctatgtctcagggtcacattttccatctatgaaccaatcatattcagagggtgggaatgctaatttggccaggcctggggtcatatatacaagtctaggggaagaaattgagctttaatcccctgtccaattgacatggactgattaggggtattaatgggaagaaggtgtgccaccacaaaaggaatttacccctggg

SEQ ID NO: 81 - DNA, 1230 bp, Homo sapiens
  misc_feature (1140)..(1140): n equals a,t,g, or c
  misc_feature (1191)..(1191): n equals a,t,g, or c
  misc_feature (1200)..(1200): n equals a,t,g, or c
  misc_feature (1219)..(1220): n equals a,t,g, or c
cggacgcgtgggggcgagcccggcccgcgaacgtcacgtccctgcgcgctccctgcactctcccgagctgcgctaggcgggcgccacggctgcccggcgaaggaaaccgaaaccgagtccgggcccgtccctccgcggccccatccgcccggtgcacccggggycgcgctcgccaggccgcggagcccagagctgcgcgcacgaaccgtgcgccgggagggcgtgggcgtggcgccgaagggtcccgrgtcttcgacgcctctgcggcggctcctccctccttgcagttggatccctggcgggtgcggcccggcccggcccgtgagcggcgcacagaatgggccgatgctgcttctacacggcggggacgttgtccctgctcctgctggtgaccagcgtcacgctgctggtggcccgggtcttccagaaggctgtagaccagagtatcgagaagaaaattgtgttaaggaatggtactgaggcatttgactcctgggagaagccccctctgcctgtgtatactcagttctatttcttcaatgtcaccaatccagaggagatcctcagaggggagacccctcgggtggaagaagtggggccatacacctacagggaactcagaaacaaagcaaatattcaatttggagataatggaacaacaatatctgctgttagcaacaaggcctatgtttttgaacgagaccaatctgttggagaccctaaaattgacttaattagaacattaaatattcctgtattgactgtcatagagtggtcccaggtgcacttcctcagggagatcatcgaggccatgttgaaagcctatcagcagaagctctttgtgactcacacagttgacgaattgctctggggctacaaagatgaaatcttgtcccttatccatgttttcaggcccgatatctctccctattttggcctattctatgagaaaaatgggactaatgatggagactatgtttttctaactggagaagacagttaccttaactttacaaaaattgtggaatggaatgggaaaacgtgcacttgactggtggrtaacagacaagtgcaatatgattaatggaacagatggagawtcttttcacccactaatamccaagrtgaggkccyttawgncttcccatctgactttttgcaggcaagggatattactttcaagggactatnaaaagtgtncagggactggctgcctttnnggataaaagt

SEQ ID NO: 82 - DNA, 623 bp, Homo sapiens
  misc_feature (577)..(577): n equals a,t,g, or c
cggacgcgtgggggaggcagctctgtgaggtgggaggaaagcgtggcttctgtgctactggcccatagttggagcctaccacccatctgagagtgggcgccattcctcaaggctgtgtagctaakgaktggcaggcccctgacccctggcctgtctctgtctctgttgagcagtgcaggtgtcccatcccatctccctgtgcattaggccccctaacacacacaaacctgtagtatatttggtaggcagtgccaccccaaagtggctggctccttgcatgcctgcccatctcggcagaatgggcattgtgaggctggggctgctgtgcctaaaggtctcagtcctgttcgtttgtttagtcagctgccacagctcttgcatgatctgggggtgcagaaaagacttgcatttgacccctgccctcatgacacagattgtcacagtcttccagggtaggaccagcttcctgcaagggatggtggtgggtggcagcagatcccagacacctgtgtgggccaggctgcagagcagggtgggggctgtgaggggctggccgggagggaggtgcatcaccggngccttgtgctgttagctttcagagacagcctatggtaatgacaagc

SEQ ID NO: 83 - DNA, 638 bp, Homo sapiens
  misc_feature (624)..(624): n equals a,t,g, or c
ctcatttcctgaactgctactgtgctggaagtactcctgacagtttgtatcctccctcagaagctgtgacctatttttaatgttgctttttcaggtaaagagataatattacatgctgtgtaatattatycwttgctgtataaatggatgaagaagaatttataaattccagacctacttagcattttcatgctctttataattactaaaagtctatcactatttgagtcacaggttaacttaaaaaaattaaagaatccaaaactgtatttttgttctaccaattcctcttcacatgcacacctttacattattttctgtaaatcctgttttactttgggtttttttttttcttctttcttttttcttttttttttttaagagacatagtcttgctctgttgcccaggctggagtgcagtggtgtgatctcagctcactgcatcctctgcctcctgggttcaagtgagtcttgtgcctcagcctcccaagtaggtgggattatgggcatgtgtcgtcacacctggctaatttttgtattttagtagagacagggttttaccatgttggtcaggctggtctcaaactcctgtcctcaagtgatccacccacctgggcctcccanaattttgggatcac

SEQ ID NO: 84 - DNA, 653 bp, Homo sapiens
aagtattatcagaagtggctcaagcaacagaaatgcaaatgttaacatttcttttatgttttggttttccattttcaactgccttttatttccacgcaggggaacgtgaggagaaatgcctaatakwwkwyattccaagcgacacactggtaacagggactttcaagatacagcaatgggacataggcagacatacgttccttgaatctgctcctggtttgggaatgtttgtgactattacaacttacaatgatgagcggatccacttagatattcgagttggagaacacgrccttgatgcggccmttgctcaagcaaaggrcaaagttaatgaacttwccttcaagcttgaacatctaattgaacaaattgagcaaatagtcaaagaacaaaactatcaaagggmccgtgaagaaaattttygaacgaccagtgaagatmcaaatagcaatgttttatggtgggcttttgcmcaaatattaatctttatctcagtcggaattttycaaatgaagtacctgaaagacttctttatagctaagaagattgtttwaaatattatcaataaggacaaataatytgcataatgtttgagttaataaatcaaaatwcctgccaaaaaaaaaaaaaaaaaaaaaaaaaaaaaaaaaaag

SEQ ID NO: 85 - DNA, 928 bp, Homo sapiens
ccacgcgtccgagggcccccggacgctaaagcggtgccagcggcggagtctccaactgggagagctgcagctgccgagaggaggagaacgctgaggtcggtcggaccaacggacgcgctgaccgctgccaactgcagctcgcgctgcctcctgctcgcgccgtgccactaaggtcaytcccgcctccgagagcccagagccgagatggaaacggtccaggagctgatccccctggccaaggagatgatggcccagaagcgcaaggggaagatggtgaagctgtacgtgctgggcagcgtgctggccctcttcggcgtggtgctcggcctgatggagactgtgtgcagccccttcacggccgccagacgtctgcgggaccaggaggcagccgtggcggagctgcaggccgccctggagcgacaggctctccagaagcaagccctgcaggagaaaggcaagcagcaggacacggtcctcggcggccgggccctgtccaaccggcagcacgcctcctaggaactgtgggagaccagcggagtgggagggagacgcagtagacagagacagaccgagaaggaagggagagacagagggggcgcgcgcacaggagcctgactccgctgggagagtgcaggagcacgtgctgttttttatttggacttaacttcagagaaaccgctgacatctagaactgacctaccacaagcatccaccaaaggagtttgggattgagttttgctgctgtgcagcactgcattgtcatgacatttccaacactgtgtgaattatctaaatgcgtctaccattttgcactagggaggaaggataaatgctttttatgttattattattaattattacaatgaccaccattttgcattttgaaataaaaaactttttataccaaaaaaaaaaaaaaaaaaaaaag

SEQ ID NO: 86 - DNA, 1141 bp, Homo sapiens
  misc_feature (825)..(825): n equals a,t,g, or c
ggaaccggccagctcctgctctgtcccctcaggtgtcctgcaggcacagcatctcggggggcccaggccgatggcaggtcttaacgtgtccctctccttcttctttgccaccttcaccctctgtgaggcagccaggcgggcctccaaggccctgctcccagtgggcgcctatgaagtcttcgcccgggaggcggtgggygcggtgcagctcggggcctgctkcctggagatgaggacgctggtcgagctcgggccctgggctggggactttgggcctgacctgctgctcaccctgctcttcctgctcttcctggcgcacggggtcaccttggacggggcctcggccaaccccacygtgtccctgcaggagttcctcatggccgagsagtctctgcctggcacgctgytgaagctggcggcacaggggctgggcatgcaggccgcctgcaccctgaygcgcctctgctgggcctgggagctcagtgacctgcacctgctgcagagcctcatggcccagagctgcagctcggccctgcgcacatccgtgccccacggggcgcttktggaggccgcctgcaccttttgtttccatctgaccctcctgcacctgcggcacagtcctcccgcctacagcgggccygctgtggctctgttggtcaccgtcayggcctacacggccggcccttacgtctgcttcttcaaccctgccctggccgctctgtgacctttgcctgctcgggacacaccttactggagtacgtgcaggtgtactggctgggccctctgacagggatggtcctggctgtgctgctgcaccagggccgncttccccrccttttccagaggaacctgttctacggccagaagaacaagtaccgagcaccccgagggaagccggccccggcctcaggggacacccagacccctgcaaaggggtccagtgtccgggagcctgggcgcagtggtgttgaggggccacattccagctgagtggccttgctctgtgtgagccccgtgcgagggccctgcttgtagctggaccctggaaccttctgtagctaagagggaatcctggccccctccccagaagccatttgtcaataaaccatttctaagaaaaaaaaaaaaaaagggcggccgc

SEQ ID NO: 87 - DNA, 1874 bp, Homo sapiens
  misc_feature (1860)..(1860): n equals a,t,g, or c
  misc_feature (1863)..(1864): n equals a,t,g, or c
  misc_feature (1866)..(1869): n equals a,t,g, or c
  misc_feature (1871)..(1872): n equals a,t,g, or c
cgggtcgacccacgcgtcagccgcattgcccgctcggcgtccggcccccgacccgcgctcgtccgcccgcccgcccgcccgcccgcgccatgaacgccaaggtcgtggtcgtgctggtcctcgtgctgaccgcgctctgcctcagcgacgggaagcccgtcagcctgagctacagatgcccatgccgattcttcgaaagccatgttgccagagccaacgtcaagcatctcaaaattctcaacactccaaactgtgcccttcagattgtagcccggctgaagaacaacaacagacaagtgtgcattgacccgaagctaaagtggattcaggagtacctggagaaagctttaaacaagtaagcacaacagccaaaaaggactttccgctagacccactcgaggaaaactaaaaccttgtgagagatgaaagggcaaagacgtgggggagggggccttaaccatgaggaccaggtgtgtgtgtggggtgggcacattgatctgggatcgggcctgaggtttgccagcatttagaccctgcatttatagcatacggtatgatattgcagcttatattcatccatgccctgtacctgtgcacgttggaacttttattactggggtttttctaagaaagaaattgtattatcaacagcattttcaagcagttagttccttcatgatcatcacaatcatcatcattctcattctcattttttaaatcaacgagtacttcaagatctgaatttggcttgtttggagcatctcctctgctcccctggggagtctgggcacagtcaggtggtggcttaacagggagctggaaaaagtgtcctttcttcagacactgaggctcccgcagcagcgcccctcccaagaggaaggcctctgtggcactcagataccgactggggctgggcgccgccactgccttcacctcctctttcaacctcagtgattggctctgtgggctccatgtagaagccactattactgggactgtgctcagagacccctctcccagctattcctactctctccccgactccgagagcatgcttaatcttgcttctgcttctcatttctgtagcctgatcagcgccgcaccagccgggaagagggtgattgctggggctcgtgccctgcatccctctcctcccagggcctgccccacagctcgggccctctgtgagatccgtctttggcctcctccagaatggagctggccctctcctggggatgtgtaatggtccccctgcttacccgcaaaagacaagtctttacagaatcaaatgcaattttaaatctgagagctcgctttgagtgactgggttttgtgattgcctctgaagcctatgtatgccatggaggcactaacaaactctgaggtttccgaaatcagaagcgaaaaaatcagtgaataaaccatcatcttgccactaccccctcctgaagccacagcagggtttcaggttccaatcagaactgttggcaaggtgacatttccatgcataaatgcgatccacagaaggtcctggtggtatttgtaactttttgcaaggcatttttttatatatatttttgtgcacatttttwtttacgtttctttagaaaacaaatgtatttcaaaatatatttatagtcgaacaattcatatatttgaagtggagccatatgaatgtcagtagtttatacttctctattatctcaaactactggcaatttgtamagaamtatatmtgatatataacatgtgayygcmgctttycaakgttagccacagkgtatttttcacttggwctamaatggatcamatgkgacatatwtgcctacataaaagctatggtcakggawaaaggtctantanntnnnngnnta

SEQ ID NO: 88 - DNA, 751 bp, Homo sapiens
aaagggatgctgctatcagtctttctaggatccgggacacagattttaattatgacctttgtgactctatttttcgcttgcctgggatttttgtcacctgccaaccgaggagcgctgatgacgtgtgctgtggtcctgtgggtgctgctgggcacccctgcaggctatgttgctgccagattctataagtcctttggaggtgagaagtggaaaacaaatgttttattaacatcatttctttgtcctgggattgtatttgctgacttctttataatgaatctgatcctctggggagaaggatcttcagcagctattccttttgggacactggttgccatattggccctttggttctgcatatctgtgcctctgacgtttattggtgcatactttggttttaagaagaatgccattgaacacccagttcgaaccaatcagattccacgtcagattcctgaacagtcgttctacacgaagcccttgcctggtattatcatgggagggattttgccctttggctgcatctttatacaacttttcttcattctgaatagtatttggtcacaccagatgtattacatgtttggcttcctatttctggtgtttatcattttggttattacctgttctgaagcaactatacttctttgctatttccacctatgtgcagaggattatcattggcaatggcgttcattccttacgaggggctttactgcagtttatttcttatctatgcagtacactactt

SEQ ID NO: 89 - DNA, 1080 bp, Homo sapiens
gtttctttaagttggtttagccttcctgtatacatgtgataatgatactgttttaaagaacaggtgtgaaagtctaagagtttaatccagactctgcacaagaagttaatctgccaaaccctaggattctccttctgaaagctcagaatatttcttccccttccctatacacacagggctcgaagggttagagaagaaaggcagacaacagcttctgagctttggactaatcacagcctctgttctcagcaggagccccaacactgagaccagaaaagatggtgctatgctttcctcttcttttactgctgctggttctatggggaccagtgtgtccacttcatgcttggcctaagcgtctcaccaaggctcactggtttgaaattcagcatatacagccaagtcctctccaatgcaacagggcaatgagtggcatcaacaattatacccagcactgtaagcatcaaaatacctttctgcatgactctttccagaatgtggctgctgtctgtgatttgctcagcattgtctgcaaaaatcgtcrgcacaactgccaccagagctcaaagcctgtcaacatgactgactgcagactcacttcaggaaagtatccccagtgccgctatagtgctgctgcccagtacaaattcttcattgttgcctgtgacccccctcagaagagcgatcccccctacaagttggttcctgtacacttagatagtattctctaaggcatccactgcatttcctttcatttgacatagcttctgttacaattgcatccacgttttcttttcttttgttgattttcttgttcccgtagaagaaagaagaaaggtgtttggagaattcgagtgcctaggatgccagaccagagttgagacaaaaagaaataagattattttctgctttgtagttctgtacttttcgagagaagggaatagggaagacagcaaagaaagattcagatttctaaccctgcaacttttgccaagctttattgccctgtgttcacagcaataaaaccacttcctgctgcattctaaaaaaaaaaaaaaaaaaaaaaaaaaaaaaaaaaaa

SEQ ID NO: 90 - DNA, 1587 bp, Homo sapiens
agatctgtgagcccagcgctgactgcgccgcggagaaagccagtgggaacccagacccataggagacccgcgtccccgctcggcctggccaggccccgcgctatggagttcctctgggcccctctcttgggtctgtgctgcagtctggccgctgctgatcgccacaccgtcttctggaacagttcaaatcccaagttccggaatgaggactacaccatacatgtgcagctgaatgactacgtggacatcatctgtccgcactatgaagatcactctgtggcagacgctgccatggagcagtacatactgtacctggtggagcatgaggagtaccagctgtgccagccccagtccaaggaccaagtccgctggcagtgcaaccggcccagtgccaagcatggcccggagaagctgtctgagaagttccagcgcttcacacctttcaccctgggcaaggagttcaaagaaggacacagctactactacatctccaaacccatccaccagcatgaagaccgctgcttgaggttgaaggtgactgtcagtggcaaaatcactcacagtcctcaggcccatgwcaatccacaggagaagagacttgcagcagatgacccagaggtgcgggttctacatagcatcggtcacagtgctgccccacgcctcttcccacttgcctggactgtgctgctccttccacttctgctgctgcaaaccccgtgaaggtgtrtgccacacctggccttaaagagggacaggctgaagagagggacaggcactccaaacctgtcttggggccactttcagagcccccagccctgggaaccactcccaccacaggcataagctatcacctagcagcctcaaaacgggtcartattaaggttttcaaccggaaggaggccaaccagcccgacagtgccatccccaccttcacctcggagggatggagaaagaagtggagacagtcctttcccaccattcctgcctttaagccaaagaaacaagctgtgcaggcatggtcccttaaggcacagtgggagctgagctggaaggggccacgtggatgggcaaagcttgtcaaagatgccccctccaggagagagccaggatgcccagatgaactgactgaaggaaaagcaagaaacagtttcttgcttggaagccaggtacaggagaggcagcatgcttgggctgacccagcatctcccagcaagacctcatctgtggagctgccacagagaagtttgtagccaggtactgcattctctcccatcctggggcagcactccccagagctgtgccagcaggggggctgtgccaacctgttcttagagtgtagctgtaagggcagtgcccatgtgtacattctgcctagagtgtagcctaaagggcagggcccacgtgtatagtatctgtatataagttgctgtgtgtctgtcctgatttctacaactggagtttttttatacaatgttctttgtctcaaaataaagcaatgtgttttttcggacatgcttttctgccactccatattaaaacatatgaccattgagtccmtgctaaaaaaaaaaaaaaaaaaaaaaaaaa

SEQ ID NO: 91 - DNA, 716 bp, Homo sapiens
  misc_feature (676)..(676): n equals a,t,g, or c
  misc_feature (698)..(698): n equals a,t,g, or c
  misc_feature (703)..(704): n equals a,t,g, or c
  misc_feature (711)..(711): n equals a,t,g, or c
  misc_feature (713)..(713): n equals a,t,g, or c
ggctttacggctgcgagaagacgacagaaggggagggaactgctcgctgagcacagctgcacagtgctgtcagaacggccgatctccagcccaagatgattccagcagtggtcttgctcttactccttttggttgaacaagcagcggccctgggagagcctcagctctgctatatcctggatgccatcctgtttctgtatggaattgtcctcaccctcctctactgtcgactgaagatccaagtgcgaaaggcagctataaccagctatgagaaatcagatggtgtttacacgggcctgagcaccaggaaccaggagacttacgagactctgaagcatgagaaaccaccacagtagctttagaatagatgcggtcatattcttctttggcttctggttcttccagccctcatggttggcatcacatatgcctgcatgccattaacaccagctggccctacccctataatgatcctgtgtcctaaattaatatacaccagtggttcctcctccctgttaaagactaatgctcagatgctgtttacggatatttatattctagtctcactctcttgtcccacccttcttctcttccccattcccaactccagctaaaatatgggaagggagaacccccaataaaactgccatggactggaaaaaaaaaaaaaaaaaangggggcccttttaaaaatccantttannaccgggntncca

SEQ ID NO: 92 - DNA, 1216 bp, Homo sapiens
ggtcgacccacgcgtccgcactcagacaccgtgtcctcttgcctgggagaggggaagcagatctgaggacatctctgtgccaggccagaaaccgcccacctgcagttccttctccgggatggacgtggggcccagctccctgccccaccttgggctgaagctgctgctgctcctgctgctgctgcccctcaggggccaagccaacacaggctgctacgggatcccagggatgcccggcctgcccggggcaccagggaaggatgggtacgacggactgccggggcccaagggggagccaggaatcccagccattcccgggatccgaggacccaaagggcagaagggagaacccggcttacccggccatcctgggaaaaatggccccatgggaccccctgggatgccaggggtgcccggccccatgggcatccctggagagccaggtgaggagggcagatacaagcagaaattccagtcagtgttcacggtcactcggcagacccaccagccccctgcacccaacagcctgatcagattcaacgcggtcctcaccaacccgcagggagattatgacacgagcactggcaagttcacctgcaaagtccccggcctctactactttgtctaccacgcgtcgcatacagccaacctgtgcgtgctgctgtaccgcagcggcgtcaaagtggtcaccttctgtggccacacgtccaaaaccaatcaggtcaactcgggcggtgtgctgctgaggttgcaggtgggcgaggaggtgtggctggctgtcaatgactactacgacatggtgggcatccagggctctgacagcgtcttctccggcttcctgctcttccccgactagggcgggcagatgcgctcgagccccacgggccttccacctccctcagcttcctgcatggacccaccttactggccagtctgcatccttgcctagaccattctccccaccagatggacttctcctccagggagcccaccctgacccacccccactgcaccccctccccatgggttctctccttcctctgaacttctttaggagtcactgcttgtgtggttcctgggacacttaaccaatgccttctggtactgccattcttttttttttttttttcaagtattggaaggggtggggagatatataaataaatcatgaaatcaatacaaaaaaaaaaaaaaaaaaaaaaaaaaaaaaaaaaaa

SEQ ID NO: 93 - DNA, 542 bp, Homo sapiens
cccacgcgtccgcagctgtcccactcaccatggagaagatcctgatcctcctgcttgtcgccctctctgtggcctatgcagctcctggcccccgggggatcattatcaacctggagaacggtgagctctgcatgaatagtgcccagtgtaagagcaattgctgccagcattcaagtgcgctgggcctggcccgctgcacatccatggccagcgagaacagcgagtgctctgtcaagacgctctatgggatttactacaagtgtccctgtgagcgtggcctgacctgtgagggagacaagaccatcgtgggctccatcaccaacaccaactttggcatctgccatgacgctggacgctccaagcagtgagactgcccacccactcccacacctagcccagaatgctgtaggccactaggcgcaggggcatctctcccctgctccagcgcatctcccgggctggccacctccttgaccagcatatctgttttctgattgcgctcttcacaattaaaggcctcctgcaaaccttaaaaaaaaaaa

SEQ ID NO: 94 - DNA, 1199 bp, Homo sapiens
aataattctaagtgtccaaaggaagtgatgagtcacttgtgggtagcagtaattgatttccatctaaggcagtgttttgctccttgtgtttgtggattgtgaatgccacaagagtttaaatcttgtcattccagctaattctcactttttaaatacaggaattagaaggtgacgaggagggagaagacgaggatgatgcggaaattaaccccaaggtgtaatttttgtctgttaatcattcatacgtttctagaaggaacccagccagccggcggaatgcaagcagcagtaggaagcggaggcgggtgcctggcagaccggctgtcgggactccaggcctgtgggcggggcctcggtccttgccgcagcacaatcccgtggacagagcttactccatctaactcgttttcaagtgcatgattttcactttcacttttcctttttccttattattttgcttaacttgtacagtggcaactgaaatgcatttcagaaataggaggtttcgtccagcaccctctgcagccttggtgcctgtagctctggacttccctgggcctttccctgtgggagggccctgtagaccacatcagggtggggtgggggtcacttggcaaaaagggccgaggtctggtgatgtggttcccaggatctggaacctctcccacccctcctgcagttggactgaattcttccctttcatccgaagaaamccacttgctgtttccagccgctgaatctgctgagtgtgcagactgcatcacctgctgtatgccgatcatctcagaaagggctgtgtagagtagggccctgttctccttaggatgttgcttcttcatttaaaaaaaaaaggggggggtacaagggattgtgacacaccagcccaggtgacagcttgtgcgggtcaactcataatatatttatcgcttttgactgtgaaggcctgggggatatcacatggggaacagacctataggtatctgaaaccaacttgggtgcctgaacaagaagattgtcaattccatagagggggccaaggccgtgtcggaagaacaggagctcctgtcaccgggttgtaaaaagtgaacgagacattaagagaggcgccaccagtgcgcagagagggttaaggaaatcacccagagaaaaggggggagacacacgagaaagaggacagaatgagaacaggtacaaaacac

SEQ ID NO: 95 - DNA, 844 bp, Homo sapiens
gagggtatatagagaaaaggatctcatgtattgctctacttttttcttctagatacctgttaacttcttacgctttcatgatacatttatctagttctgttattcaagttaaagtattatacagttaagtctatggcagagtcagattcttttatgtgtctaactgttgcgaagtatagacttcttatatcttatatggtgaccattaacatataacgagcatgctagcatattgttgtctttgagagcaccgtatcaactttttgatctgtagaatgacagaagccacattcgatactctgcgactctggttaataatcctgctgtgtgctttgcggttggccatgatgcgtagtcacctgcaagcttatttaaatttagcccaaaaatgtgtggatcagatgaagaaagaagcggggcgaataagcacggttgagctacagaaaatggtaagttttataccctagtcaaaatgaaaaatagcaaaaaccgcactgtaaaaaaaaaaaaaaaattggtttcctttagtagatagtatttcaacccatcatattcttattataaataaacagaacaatcttaagttgacagatatcaaagagaccttgatctgattttggtgccaagtgaggtcttaattcctcttcctgccttaagtgcttggtgtcatacagtgggtggtacaaagctgttttatgcctaatattgctaaatgggacccttctaattgattkgaaagacattataacatattgkccagactttaagacttaaagagtaggaaatactacttttagtggctaaatttayycattctaataggactcaatttacttgaacatgg

SEQ ID NO: 96 - DNA, 614 bp, Homo sapiens
agactmttgagattgtgtctctgtataataaatttmttgcactagcattataacaatttgatatattctatatttcattaactagtataaagatgaaatggcaatacttgtaaaaagttctcatgtttgtttcatggtaattttaggtttactttttctaagaaactgccaaattgttttccagagtggtaatactattccactttaccaccataaatctaacagtggttcagtttctccacatccttgccagcatttgaagttgtcactattttgtatttttagcattgcttattatttatttatttatttaatttatttatttattttgagacagagcctgggcgacagagaaagactccatctcaaaaaaaaaaaaaaaaaaaaaaagcaatcattaagcttttcatctagccattacttttgtacaggctytcattaattccacatagatggtctaatggtctactaaatagtattctaatcctccatcttgtctatctyttagccattctccatgataaaggatgaatggtctttcggaaacataaatgaaaccatgctgctttaaaaaaacaaaaaacaaaaaaaaaaaaaaaaaaaaaaaaaaaaag

SEQ ID NO: 97 - DNA, 628 bp, Homo sapiens
tctaggtcatggacgtctttgggggctgttctgtgtcccaagggggtaagctggcttcaggcgatctgtggcccatgtttcaagttgactttgagcttgtggtcacttgtgtggatgtcctttgagactctcctagcaggcgtgcctgctgcagcccttagctgggcagtgcctggcctttcaccctcctggttcaccctgggtcctggttcaccctgggtcctggttcaccctgggtcctggtcctgtagcccctcactgctgggctcctggtgttmtacggaaggtctccttctgcgatgtctccaggctgctgtggccacctgtcccagatgccccacctctgacctgytgctgggaggcagggcagtcagttcctggcaacggaccttgctctgctgccctggcccctcarctgcctcacgcgtgacatggccattggctggagctctccgaggcagggccactgaagcccccgagccctgagaggctgaccctgcactcactctaaggggaaatggaactcggccctctagcaggcctccacagccttgaccctttcacaccaccatctgtgtgaggcctcaaaagattgtgcmctttccttgaaaaaaaaaaaaaaaaaaag

SEQ ID NO: 98 - DNA, 634 bp, Homo sapiens
tctagcccagggaagcccttccgtgggggccccggcyttgagggatgccaccggttctggacgcatggctgattcctgaatgatgatggttcgccgggggctgcttgcgtggatttcccgggtggtggttttgctggtgctcctctgctgtgctatctctgtcctgtacatgttggcctgcaccccaaaaggtgacgaggagcagctggcactgcccagggccaacagccccacggggaaggaggggtaccaggccgtccttcaggagtgggaggagcagcaccgcaactacgtgagcagcctgaagcggcagatcgcacagctcaaggaggagctgcaggagaggagtgagcagctcaggaatgggcagtaccaagccagcgatgctgctggcctgggtctggacaggagccccccagagaaaacccaggccgacctcctggccttcctgcactcgcaggtggacaaggcagaggtgaatgctggcgtcaagctggccacagagtatgcagcagtgcctttcgatagctttactctacagaaggtgtaccagctggagactggccttacccgccaccccgaggagaagcctgtgaggaaggacaagcgggatgagttggtggaagccattgaa

SEQ ID NO: 99 - DNA, 730 bp, Homo sapiens
cccaagtcatggccacgggcgagggggtgggggcctcgttgctctgtcctctcccagtccagcatgtggcagggccgtcgggcctcaraggtgtcccctcactcagggagcctggcggtgggccctgtccacccaccccattttcctgagcagcgggaggtgggaaggcatccgtttagggagtcagctaatttcatacctctctggtttctcatctaaagcccagccctcatgggcctggtgtggcaccacaagcccaggctcctgggtaccgtgcccctcctctgcagggcagtgtgtctgtggggcagtttgcttctgtcctgtttctgggatgggcctacactgccctccagggaggccccaaggggtgcaggtgagcagggttggcaacggcagctttgggcaggacgggcactgtgccgcacctgtgcggcaccgggtgtggctggcacggtttggctgctgtctgcctgagcactgcctgtgctggccagtgcgtctcccagtccttgggacagccttgtgggaggcccaggccgccctgagcatggggaccccagggccggaggtgcgacctgagcatggggatcccggggccggargcrtgamgtgggtctcctcatcccgacctcagctccagacatgtcaccatctcccccgggtttggcattttttggggaaaagcctcccctaaaaactgtacagccagaaaaaaaaaaaaaaaaag

SEQ ID NO: 100 - DNA, 2382 bp, Homo sapiens
ccacgcgtccgcagccaccaccccctgtcccctggattaatgcagttgcctccaactggtctccctgcttctgatcttactccttacagatgattcccgccatggcagctcttttggaatgcaccttaggttatgccacttctctgctcagcaccctttaggggctttgccccggctcccatttctcgctgccttgttggccctagtgacactggcttacttcaggctcatctcctctcagggcctgtgcactttctccctctgcttggaatgccctttccctgatgtctgcctggcttatgccacctgtacttccttcaggcacaagaggggcccccataatccagagcagcccttcccaactcctccctaccacctgctatgaagcccacccaatgctctgtgttcacggattcatttttattgtctgtctccccactagggagtaattgctctgagggcaggtacttccacaagtgtttggtgaaggaatgagtgaatggcacagggcgggagcacagtgaatgttttttgttcaaataggaagcaatgataccaaataaaaaccaggtagcattgtctcagcagctgcaggaacagtgctatgtgctgaagaagaattggggatcttgaggcctaggcacactctttcagtcttctgatggccattgtggcttttgagggggcagcttcgggggggtgatggggacaaaacccacagtgcaaggctctggggagtgagtatgaggaaagagcaaacgtgggtgacgctgtcagggagtgaaaggatggaatgaggtgaggcgctagtttgagtagtttgaggccaaagcagggtggaaggacggcggtggtggtttttataggatcaaacagattttgacaaaatgaaacaaaagctatctgacaaaagggtagattgaataaatatgctggatatgtacacaggttaaagtgtttccatcacatgcagccagttcctgcttagttccatgtgagttaggcactgtgagggacggtcggtggcagagttttaattccaggcgagtacagcagccgggctgcttcctctattgctcaactgatgtgtgttcagaggatccaaactcatttcactgtcattctaaggaaaacatcatggacaatgtaaattttattctctttctaccctgttttaaaaaactaaaaaaaaaacctaaaaaaaaaaaaaagtcctccaaaacactgcacaattcaccccaaagccaaaccgagttttaggattgcttaataatgtcttatctttatctcttcttaaaagaaacttcagaatggttcacggtgaaactttctcaaatacagcccctgatcgaggttaagatcagtttggtctggcatcaagtctgaattatagaacactaaggaagaaaaacattcacgtctatggtgacattttttatccgcagggctgggggtggccatgccttagggatgcctgtgaatgcactaacaacaaataaagggaatcttttctgttttttccttttattcccggcaagctgtgagataagagcactctctgaacttttgccggggccagcgtggtgctgggaattttcgtgcctgttacgccacttctgtcatccatctgacatcaggcccgagtattagtattatcaaacccatttttgcaagtgaagcaccggaaagctaaggagggtttgcccgttgctcaagcccactagggtgctgtggtgtgggcagagtccgttgaaaacatgtctggccaggcgcggtagctcacgcctgtaatcccagcactttgggaggctgagaagggcggatcacttgaggtcgggagtttgagaccagcctggccaacatggtgaaacctcgtctctattaaaaatacaaaataaggccgggcgcggtggctcaagcctgtaatcccagcactttgggaggccgaggcgggcggatcacgaggtcaggagatcgagaccttcctggctaacacggtgaaaccccatctctactaaaaatacaaaaaattagccgggcgtggtggcgggcgcctgtaatcccagctactcgggaggctgaggcaggagaatggcgtgaacccaggaggcggagcttgcagtgagccgggatagcgccactgcagtccagcctgggcgaaagagtgagactcctctcaaaaaaaaaaaaaaaaaaaaaataattagccgggcatggtagccggcacctgtaatcccagctactcgggaggctgaggctggagaatcacttgaacctgggaggtggaggttgcagtgagccaatattgtgccattgcactccagccttggcaaaagagggagactccccctcagcaaaaaaaaaaaaaaaaaaaaaaaaaaa

SEQ ID NO: 101 - DNA, 1021 bp, Homo sapiens
gaattcccgggtcgacccacgcgtccggatagcaaaagaactgaggaagctctttccactacggctgtattgcactgactcaaatctgaggccagagaagtgtcgtcgctttgtccatccccagtggcagcttcttcacctgaatgggactatccacagcacaagtgaggcagacacagaaccctgtgtggatggctgggtatatgatcaaagctacttcccttcgaccattgtgactaagtgggacctggtatgtgattatcagtcactgaaatcagtggttcaattcctacttctgactggaatgctggtgggaggcatcataggtggccatgtctcagacaggtttgggcgaagatttattctcagatggtgtttgctccagcttgccattactgacacctgcgctgccttcgctcccaccttccctgtttactgtgtactacgcttcttggcaggtttttcttccatgatcattatatcaaataattctttgcccattactgagtggataaggcccaactctaaagccctggtagtaatattgtcatctggtgcccttagtattggacagataatcctgggaggcttggcttatgtcttccgagactggcaaaccctgcacgtggtggcgtctgtacctttctttgtcttctttcttctttcaaggtggctggtggaatctgctcggtggttgataatcaccaataaactagatgagggcttaaaggcacttagaaaagttgcacgcacaaatggaataaagaatgctgaagaaaccctgaacatagaggttgtaagatccaccatgcaggaggagctggatgcagcacagaccaaaactactgtgtgtgacttgttccgcaaccccagtatgcgtaaaaggatctgtatcctggtatttttgagaaaaaaaaatctcaaggaaaaggcataaaaatgattgctacacaaaagtgaccaaattttaagaagccttcatgagctgattggtggggaaattcagaaaaaaaaaaaaaaa

SEQ ID NO: 102 - DNA, 1552 bp, Homo sapiens
ccacgcgtccggcagctgggagacaggcctccctctggagttcatagctgagttgctgtccaaatcagtggtccctagaatctataaaacaaaactgagaacttcagaggtgcatccagagaagccacactccaaaaggaccacttccagacgccatgcggcaaaccctaccgctgctgctgctgacggtgctgcgccccagctgggcagaccctccccaggagaaggtcccgctcttccgggtcactcagcagggcccctgggggagcagtggcagcaacgccaccgactcgccctgcgaggggctgcccgccgcggatgcgacggccttgaccctggcgaaccgcaacctggagcgcctgcccggctgcctaccgcgcacactgcgcagcctcgacgccagccacaacctgctgcgcgccctgagcacttccgagctcggccacctggagcagctgcaggtgctgaccctgcgccacaaccgcatcgccgcgctgcgctggggcccgggtgggccggcggggctgcacaccctggacctcagctacaaccagctggccgctctgccgccgtgcgccgggcccgcgctgagcagcttccgcgccctggcgctcgccgggaatccgctgcgggcgctgcagccccgggccttcgcctgcttccccgcgctgcagctcctcaacctctcctgcaccgcgctgggtcgcggagcccaggggggcatcgccgaggcggcgttcgctggagaggatggcgcgcccctggtcacgctcgaagtcctggatctcagcggcacgttccttgaacgggttgagtcagggtggatcagagacctgccgaagctcacatccctctacctgaggaagatgcctcggctgacgaccctggagggggacattttcaagatgacccccaacctgcagcagctggactgtcaggactccccagcacttgcttctgtcgccacacacatctttcaagatactccacatctacaggtccttctgttccagaactgcaacttgagttccttccctccttggaccctggattcctcccaggtcctatcgatcaacctctttggcaaccccctcacttgcagttgtgacttgtcttggctcctcacggatgcaaagagaactgtcctaagcaggtctttccagcggaagctccttcatggtcaagctctaagacacaacgagctctgttattcaagaaatcaattccagtggatttccagttccaattcctgagaactaggaaggacttcatcctccagaaggactcatcctccagaaggactcatcctccaaaggacttctccagaagggggaaatggaagacccgggtaacttgctcagggcttatcacagaactatgtttgagcctgacttcgtttgaactctaaagcccacatgctctttctactgccccatgcttctcagggtaccagactcttatttcctgcagcttttgagaattctaaagatacctgagtcattttaaataaatttcagctttctttaccaaaaaaaaaaaaaaaaaaaaaaaa

SEQ ID NO: 103 - DNA, 599 bp, Homo sapiens
gcttctgtcgccacacacatctttcaagatactccacatctacaggtccttctgttccagaactgcaacttgagttccttccctccttggacctggattcctcccaggtcctatcgatcaacctctttggcaaccccctcacttgcagttgtgacttgtcttggctcctcacggatgcaaagagaactgtcctaagcaggtctttccagcggaagctccttcatggtcaagctctaagacacaacgagctctgttattcaagaaatcaattccagtggatttccagttccaattcctgagaactaggaaggacttcatcctccagaaggactcatcctccagaaggactcatcctccaaaggacttctccagaagggggaaatggaagacccgggtaacttgctcagggcttatcacagaactatgtttgagcctgacttcgtttgaactctaaagcccacatgctctttctactgccccatgcttctcagggtaccagactcttatttcctgcagcttttgagaattctaaagatacctgagtcattttaaataaatttcagctttctttaccaaaaaaaaaaaaaaaaaaaaaaaag

SEQ ID NO: 104 - DNA, 1216 bp, Homo sapiens
cccacgcgtccgcggacgcgtgggcggctgtgtgtcgccggagccgaagcgcgcaggcccgtcccggtggccggggagcgggcgggtgggggcgccatgtggttcatgtacctgctgagctggctgtcgctcttcatccaggtggccttcatcacgctggctgtcgcggctggactctattacctggcagaactgatagaagaatacacagtggccaccagcaggatcataaaatacatgatctggttctccaccgctgtactgattggcctctacgtctttgagcgcttccccaccagcatgattggagtgggcctattcaccaacctcgtctactttggcctcctccagaccttccccttcatcatgctgacctcgcctaacttcatcctgtcgtgtggactagtggtggtgaatcattacctagcatttcagttttttgcagaagaatattatcccttctcagaggtcctggcctatttcactttctgcctgtggataattccgtttgcgttttttgtgtcactttcggccggggagaacgtcctgccctctaccatgcagccaggagatgatgtcgtctccaattatttcaccaaaggcaagcggggcaaacgcttagggatcctggttgtcttctccttcatcaaagaggccattctacccagtcgtcagaagatatactgacccccatgcaggcaggatgtggggggcaagatcaggagagtcaggcccctgggcctctatgccaggtggggaccagaagtcgggaaggcacctaccacctgccctggctttcttcccctcaactctggagccccatccccaccctccttggggggctcagcttggctcagatctgatgcttcaagaggctgtaacctcagagggcaccaaggagggtggcagagcctgcttagccaggaggccgaggtccctcagtcctcccctgtcccttccaaggtgggtcaggaggttctggccccgctggggcaggcagggcagggtctgtgaagcttaagagcagatggtgacaagttctctgggcaggtggccatggggaggggccatggcttggcatgtccaacagaaatagtttttgctgttgaacggtgatttctgtccaagtgcagatttccgtttgaataaagcttcgcttctaggtggcaaaaaaaaaaaaaaaaaaaaaaaaaaaaaaaaaaaaaaaaaaaaaaaa

SEQ ID NO: 105 - DNA, 3759 bp, Homo sapiens
  misc_feature (13)..(13): n equals a,t,g, or c
  misc_feature (16)..(16): n equals a,t,g, or c
  misc_feature (28)..(28): n equals a,t,g, or c
  misc_feature (30)..(30): n equals a,t,g, or c
  misc_feature (34)..(34): n equals a,t,g, or c
  misc_feature (3758)..(3758): n equals a,t,g, or c
ccgcctttgagtnagntgataccgctcncngcanccgaacgaccgagcgcagcgagtcagtgagcgaggaagcggaagagcgcccaatacgcaaaccgcctctccccgcgcgttggccgattcattaatgcagctggcacgacaggtttcccgactggaaagcgggcagtgagcgcaacgcaattaatgtgagttagctcactcattaggcaccccaggctttacactttatgcttccggctcgtatgttgtgtggaattgtgagcggataacaatttcacacaggaaacagctatgaccatgattacgccaagctcgaaattaaccctcactaaagggaacaaaagctggagctccaccgcggtggcggccgctctagaactagtggatcccccgggctgcaggcggctgtgtgtcgccggagccgaagcgcgcaggcccgtcccggtggccggggagcgggcgggtgggggcgccatgtggttcatgtacctgctgagctggctgtcgctcttcatccaggtggccttcatcacgctggctgtcgcggctggactctattacctggcagaactgatagaagaatacacagtggccaccagcaggatcataaaatacatgatctggttctccaccgctgtactgattggcctctacgtctttgagcgcttccccaccagcatgattggagtgggcctattcaccaacctcgtctactttggcctcctccagaccttccccttcatcatgctgacctcgcctaacttcatcctgtcgtgtggactagtggtggtgaatcattacctagcatttcagttttttgcagaagaatattatcccttctcagaggtcctggcctatttcactttctgcctgtggataattccgtttgcgttttttgtgtcactttcggccggggagaacgtcctgccctctaccatgcagccaggagatgatgtcgtctccaattatttcaccaaaggcaagcggggcaaacgcttagggatcctggttgtcttctccttcatcaaagaggccattctacccagtcgtcagaagatatactgacccccatgcaggcaggatgtggggggcaagatcaggagagtcaggcccctgggcctctatgccaggtggggaccagaagtcgggaaggcacctaccacctgccctggctttcytcccctcaactctggagccccatccccaccctccttggggggctcagcttggctcagatctgatgcttcaagaggctgtaacctcagagggcaccaaggagggtggcagagcctgcttagccaggaggccgaggtccctcagtcctcccctgtcccttccaaggtgggtcaggaggttctggccccgctggggcaggcagggcagggtctgtgaagcttaagagcagatggtgacaagttctctgggcaggtggccatggggaggggccatggcttggcatgtccaacagaaatagtttttgctgttgaacggtgatttctgtccaagtgcagatttccgtttgaataaagcttcgcttctaggtggcactgtttgccttaataccctgacagttcatcttcctttcttcctgctaaccttctgctctggactggactcacttttctgctccagggactccttttctgggtttgggtcttgcccttcccaagggactgttcttgtggcccttaatgggaagggggcaggggtgaggagctgagcctgctcaaggagtgggaagtggggctataggcagcctctctgatgcactctcttccatctctttccccaaggctccgtgactgtcaaactgggagtaggagaggggacaatttaggactgggctagattttcagaagaacatctacaatatcctatttataaatcttcctctgggaaaaggagtggtttctggctgaatactatcttaggctcaaggagaaacaaaataaaaattagcttccaggcagcctgtttttaaagaaatgggactaatgggagaagctgtttgtcactctaagagcatccaagccctggcccgtctgtgcactcttggctcctggggagatatatctgccttctaagaaggcaggccaggtcttgggcacagacctgcatttgttgaccttgcactccaactatagtgccttgcaagtgctcaacagtacatattggaatgaagtccctatgagagccatttctggccatgttctatacctcaaagtgaggctggcaggtacagagatgaactgtacacatgtgatacatttaagccactggaaaaacccctgtgcttgaaaatatttcctctatatcatgcctggagttccatcatagcccttcatttccttggctttagcatttaccttctcttaagaataccagctttcccctttccctgagaggaagagcacatgttggtctcctcttagtgtgaacgagattgccaggcccttttctcctatgcacaccaggatagacaaggcaggggatactggcagcctgcatcatcctcccattgggctgacagctggccctactttcctccctctgctgcttggtccctcaccttgatgatgtggcttcgccccctccactctactgccagtgttctcccaggggttgctaaatccagcagacccctttcctgtcttactagatctgggcagcatttgacatggctgatcaccccttgcttcttggatggcacttccctggcacctctgtggctagttgtcctacctccctggctgttcctttcaggcttccgtgcaggcttctccacttgcccatgcacagtagggtctttcagggttctgctgtgggctccctagggaagcccatccatctggatggtttcaaggatggtgaggaatttagagttgacctccagccccaacatccttcctgatcacctgaaccacagttttgctgccctctaggtgcacagacaattcaggtccatggcccagatggtacttgctgtcttctgcaaacctgccccttctgggtacttcccttgaccccgagatcactcaggagccagacaggaaacttattctattcctgttttctctttctgcccaccacatccaatctctcaaaacggtcaggtctaccttaacatctcttgatttgagccactcccactgtcatcagctttcacctggattatcgtgacagcctcctactgcttctctatcatgtggccagagctatcttcctaaaatgcattgcatagttgatcaagtcactctctggcctaaaaccttccttggctccctgctgccctcaggataaagtctggacccctcagcatggcttgtgagactcatggtgtccttgtccctgctcacctctctggtctcatcacttgccttcttgcattctgggtcccagcctcctgtatccagagatgcagtggctctccattgccactctgattcctcctttcttttggtcacagagaaagggtactttctctgtcaaatctcaacttagacttgacttcctccaaggagctttggctatactctctcctcccgacccccaccctggcatactacacagatcactctgggctcacttgcctgcctaatggtcatctccccagtagactgtaagctccttgagggcaaggattgtgttggaatttttgtattaacagtgcctggcttggtgcctggcacctagaaagcactcaataaatgcggcacgagggggggcccgtacccaattcgccctatacctcgatnc

SEQ ID NO: 106 - DNA, 485 bp, Homo sapiens
  misc_feature (435)..(437): n equals a,t,g, or c
tctgaattttaaaaagattccagatgatttacatgcacagctaagtttgaaaagtgtgagacaagaaggccttgcctgcacgatctcactatgtcttgcttttgtgacatcatctccttccattctctctcttggtcgctggttttattgcttcttctcaaaccaccaactttatccacttcaggatctttatacaaattcagtctacttgcaacatttccccctcagatctttcatattatcaacgtctctgtttatatgttacctcctgagagaggccttcactggcttttttttttcaacagtacatccacccagatttgctcagtccaccctctgcagtagctgttacaattatgtgaaattatgttatttatttggatacttgctttctatcctaccccaactccgcagaaaataaacactctgaggccnnnaaaaaaaaaaaaaaaaaaaamaaaamaamamaaaaaaaaaaaaaaggg

SEQ ID NO: 107 - DNA, 499 bp, Homo sapiens
ccacgcgtccggtctgaattttaaaaagattccagatgatttacatgcacagctaagtttgaaaagtgtgagacaagaaggccttgcctgcacgatctcactatgtcttgcttttgtgacatcatctccttccattctctctcttggtcgctggttttattgcttcttctcaaaccaccaactttatccacttcaggatctttatacaaattcagtctacttgcaacatttccccctcagatctttcatattatcaacgtctctgtttatatgttacctcctgagagaggccttcactggcttttttttttcaacagtacatccacccagatttgctcagtccaccctctgcagtagctgttacaattatgtgaaattatgttatttatttggatacttgctttctatcctaccccaactccgcagaaaataaacactctgaggccaaaaaaaaaaaaaaaaaaaaaaaaaaaaaaaaaaaaaaaaaaaaaaaaaaaaa

SEQ ID NO: 108 - DNA, 499 bp, Homo sapiens; identical to SEQ ID NO: 107

SEQ ID NO: 109 - DNA, 180 bp, Homo sapiens
catccccccagttttgttcggtcccccctttccagtagctgttccaattttgtgaaattttgttttttttttggatccttgctttttttcctcccccamctccccaraaaataacccctttggggccaaaaaaaaaaaaaaaaaaaaaaaaaaaaaaaaaaaaaaaaaaaaaaaaaaaag

SEQ ID NO: 110 - DNA, 2015 bp, Homo sapiens
ccacgcgtccggtccgcttctctctgctcttcgactgcaccgcactcgcgcgtgaccctgactccccctagtcagctcagcggtgctgccatggcgtggcggcggcgcgaagccagcgtcggggctcgcggcgtgttggctctggcgttgctcgccctggccctgtgcgtgcccggggcccggggccgggctctcgagtggttctcggccgtggtaaacatcgagtacgtggacccgcagaccaacctgacggtgtggagcgtctcggagagtggccgcttcggcgacagctcgcccaaggagggcgcgcatggcctggtgggcgtcccgtgggcgcccggcggagacctcgagggctgcgcgcccgacacgcgcttcttcgtgcccgagcccggcggccgaggggccgcgccctgggtcgccctggtggctcgtgggggctgcaccttcaaggacaaggtgctggtggcggcgcggaggaacgcctcggccgtcgtcctctacaatgaggagcgctacgggaacatcaccttgcccatgtctcacgcgggaacaggaaatatagtggtcattatgattagctatccaaaaggaagagaaattttggagctggtgcaaaaaggaattccagtaacgatgaccataggggttggcacccggcatgtacaggagttcatcagcggtcagtctgtggtgtttgtggccattgccttcatcaccatgatgattatctcgttagcctggctaatattttactatatacagcgtttcctatatactggctctcagattggaagtcagagccatagaaaagaaactaagaaagttattggccagcttctacttcatactgtaaagcatggagaaaagggaattgatgttgatgctgaaaattgtgcagtgtgtattgaaaatttcaaagtaaaggatattattagaattctgccatgcaagcatatttttcatagaatatgcattgacccatggcttttggatcaccgaacatgtccaatgtgtaaacttgatgtcatcaaagccctaggatattggggagagcctggggatgtacaggagatgcctgctccagaatctcctcctggaagggatccagctgcaaatttgagtctagctttaccagatgatgacggaagtgatgagagcagtccaccatcagcctcccctgctgaatctgagccacagtgtgatcccagctttaaaggagatgcaggagaaaatacggcattgctagaagccggcaggagtgactctcggcatggaggacccatctcctagcacacgtgcccactgaagtggcaccaacagaagtttggcttgaactaaaggacattttattttttttactttagcacataatttgtatatttgaaaataatgtatattattttacctattagattctgatttgatatacaaaggactaagatattttcttcttgaagagacttttcgattagtcctcatatatttatctactaaaatagagtgtttaccatgaacagtgtgttgcttcagactattacaaagacaactggggcaggtactctaatataaaggacaggtggtgtttctaaataattggctgctatggttctgtaaaaaccagttaattctatttttcaaggtttttggcaaagcacatcaatgttagactagttgaagtggaattgtataattcaattcgataattgatctcatgggctttccctggaggaaaggttttttttgttgttttttttttaagaacttgaaacttgtaaactgagatgtctgtagcttttttgcccatctgtagtgtatgtgaagatttcaaaacctgagagcactttttctttgtttagaattatgagaaaggcactagatgactttaggatttgcatttttccctttattgcctcatttcttgtgacgccttgttggggagggaaatctgtttattttttcctacaaataaaaagctaagattctaaaaaaaaaaaaaaaaaaaaaaaaaaaaa

SEQ ID NO: 111 - DNA, 2044 bp, Homo sapiens
cagtcttccagggcggcggtgggtgtccgcttctctctgctcttcgactgcaccgcactcgcgcgtgaccctgactccccctagtcagctcagcggtgctgccatggcgtggcggcggcgcgaagccagcgtcggggctcgcggcgtgttggctctggcgttgctcgccctggccctgtgcgtgcccggggcccggggccgggctctcgagtggttctcggccgtggtaaacatcgagtacgtggacccgcagaccaacctgacggtgtggagcgtctcggagagtggccgcttcggcgacagctcgcccaaggagggcgcgcatggcctggtgggcgtcccgtgggcgcccggcggagacctcgagggctgcgcgcccgacacgcgcttcttcgtgcccgagcccggcggccgaggggccgcgccctgggtcgccctggtggctcgtgggggctgcaccttcaaggacaaggtgctggtggcggcgcggaggaacgcctcggccgtcgtcctctacaatgaggagcgctacgggaacatcaccttgcccatgtctcacgcgggaacaggaaatatagtggtcattatgattagctatccaaaaggaagagaaattttggagctggtgcaaaaaggaattccagtaacgatgaccataggggttggcacccggcatgtacaggagttcatcagcggtcagtctgtggtgtttgtggccattgccttcatcaccatgatgattatctcgttagcctggctaatattttactatatacagcgtttcctatatactggctctcagattggaagtcagagccatagaaaagaaactaagaaagttattggccagcttctacttcatactgtaaagcatggagaaaagggaattgatgttgatgctgaaaattgtgcagtgtgtattgaaaatttcaaagtaaaggatattattagaattctgccatgcaagcatatttttcatagaatatgcattgacccatggcttttggatcaccgaacatgtccaatgtgtaaacttgatgtcatcaaagccctaggatattggggagagcctggggatgtacaggagatgcctgctccagaatctcctcctggaagggatccagctgcaaatttgagtctagctttaccagatgatgacggaagtgatgagagcagtccaccatcagcctcccctgctgaatctgagccacagtgtgatcccagctttaaaggagatgcaggagaaaatacggcattgctagaagccggcaggagtgactctcggcatggaggacccatctcctagcacacgtgcccactgaagtggcaccaacagaagtttggcttgaactaaaggacattttattttttttactttagcacataatttgtatatttgaaaataatgtatattattttacctattagattctgatttgatatacaaaggactaagatattttcttcttgaagagacttttcgattagtcctcatatatttatctactaaaatagagtgtttaccatgaacagtgtgttgcttcagactattacaaagacaactggggcaggtactctaatataaaggacaggtggtgtttctaaataattggctgctatggttctgtaaaaaccagttaattctatttttcaaggtttttggcaaagcacatcaatgttagactagttgaagtggaattgtataattcaattcgataattgatctcatgggctttccctggaggaaaggttttttttgttgttttttttttaagaacttgaaacttgtaaactgagatgtctgtagcttttttgcccatctgtagtgtatgtgaagatttcaaaacctgagagcactttttctttgtttagaattatgagaaaggcactagatgactttaggatttgcatttttccctttattgcctcatttcttgtgacgccttgttggggagggaaatctgtttattttttcctacaaataaaaagctaagattctataaaaaaaaaaaaaaaaaaarctgtcgcggccgcaagcaactcc

SEQ ID NO: 112 - DNA, 1509 bp, Homo sapiens
ccacgcgtccgattctggcttctggcctgtcattccactgagctcactgatgacctacatgttgtgaaatccaggagacatttttaggttctcgtattaacctctcagcagcatttgcctctgctgtccatgacctcctttttgaaaccatctcctcccatggcctccatgtccagtcctctctgggtttgcttgttcacctccggctgctccctctctgtctcctccatgggttcatcttcctcttgcagccacactaaccatcttgcagcctctaggacataccatggcctttgccacatgctgttccctctgtttagaatggtctcttctccctccctttgcctagctaactcttcctcatccttcagttctccattgattctcaatgtcttcagggaagcctcccttgacctccttgtgagatcgcatttccttgttatatactccttcatagctcttagcctaggtgcaacttcaccttctctagtgtggctccttgagtaaggcatctcttccctcagacagtaaacactatgaagagaggggccagtgtatttttgctctttattgtattccaaaacgcacataataagtgctcaataattatttcgtgaatgagtaaatggatcaatgtgtaattatacagtgatctacttgcttacttgtttattatctgtcattctccatgacagcaggaaacaaaacggtttagtacatacagttcctaacacatcgcacatggcacacagcaggaaacattttaattttttgaatatatgaataaggaggattccaaaggagacattctagtagttctactcatagtatgtcagtgttttgaggtttttatttttacttttttactgtcttttgatatagtttctggttacagtagagcatcaaatacctttattgcctgtagagaagagttatttggaaaatgttaccaaatagcttgttctcacaatatgttatgtataaaatagactgtctatgaagatcttgaatctatacacttctccctctcttcattgccaccaccttacttgaaattacgatcatatttcccctggactacattgaaccacacacctttccttaagtatgatttattaaactatatataaacttggatggctgagtttttactgatcttaaagccaagaatcatatctaattatattatccccaaagaaaactaggcacatataggtgcataaatagttttttattttgttgtggcagattatttccattctgcacttgacaaagtatttagttcagttaaagaaaataagtatttttaaactagcaacaaatttttattttcaaatgaccaaactgaaaatattcagttaaggtaaaacatcagtcgccaggtgtggtggctaatgcctataatcccagcactttgggagggtgagtgggaggatcgtttgagaccaggagttcaagaccagcctgggcaatatagtgagaccctgtctctacaaaaaaaaaaaaaaa

SEQ ID NO: 113 - DNA, 1497 bp, Homo sapiens
attctggcttctggcctgtcattccactgagctcactgatgacctacatgttgtgaaatccaggagacatttttaggttctcgtattaacctctcagcagcatttgcctctgctgtccatgacctcctttttgaaaccatctcctcccatggcctccatgtccagtcctctctgggtttgcttgttcacctccggctgctccctctctgtctcctccatgggttcatcttcctcttgcagccacactaaccatcttgcagcctctaggacataccatggcctttgccacatgctgttccctctgtttagaatggtctcttctccctccctttgcctagctaactcttcctcatccttcagttctccattgattctcaatgtcttcagggaagcctcccttgacctccttgtgagatcgcatttccttgttatatactccttcatagctcttagcctaggtgcaacttcaccttctctagtgtggctccttgagtaaggcatctcttccctcagacagtaaacactatgaagagaggggccagtgtatttttgctctttattgtattccaaaacgcacataataagtgctcaataattatttcgtgaatgagtaaatggatcaatgtgtaattatacagtgatctacttgcttacttgtttattatctgtcattctccatgacagcaggaaacaaaacggtttagtacatacagttcctacatagctacttggcacacagcaggaaacattttaattttttgaatatatgaataaggaggattccaaaggagacattctagtagttctactcatagtatgtcagtgttttgaggtttttatttttacttttttactgtcttttgatatagtttctggttacwgtagagcatcaaatacctttattgcctgtagagaagagttatttggaaaatgttaccaaatagcttgytctcacaatatgttatgtataaaatagactgtctatgaagatcttgaatctatacacttctccctctcttcattgccaccaccttacttgaaattacgatcatatttcccctggactacattgaaccacacacctttccttaagtatgatttattaaactatatataaacttggatggctgagtttttactgatcttaaagccaagaatcatatctaattatattatccccaaagaaaactaggcacatataggtgcataaatagttttttattttgttgtggcagattatttccattctgcacttgacaaagtatttagttcagttaaagaaaataagtatttttaaactagcaacaaatttttattttcaaatgaccaaactgaaaatattcagttaaggtaaaacatcagtcgccaggtgtggtggctaatgcctataatcccagcactttgggagggtgagtgggaggatcgtttgagaccaggagttcaagaccagcctgggcaatatagtgagaccctgtctctacaaaaaaaaaaaaaaag

SEQ ID NO: 114 - DNA, 988 bp, Homo sapiens
tccatgggttcatcttcctcttgcagccacactaaccatcttgcagcctctaggacataccatggcctttgccacatgctgttccctctgtttagaatggtctcttctccctccctttgcctagctaactcttcctcatccttcagttctccattgattctcaatgtcttcagggaagcctcccttgacctccttgtgagatcgcatttccttgttatatactccttcatagctcttagcctaggtgcaacttcaccttctctagtgtggctccttgagtaaggcatctcttccctcagacagtaaacactatgargagaggggccagtgtatttttgctctttattgtattccaaaacgcacataataagtgctcaataattmtttcgtgaatgagtaaatggatcaatgtgtaattatacagtgatctacttgcttacttgtttattatctgtcattctccatgacagcararacaaaacggtttagtacatacagttcctaacacatcgyacwtggcacacagcaggaaacattttaattttttgaatatatgaataaggaggattccaaaggagacattctagtagttctactcatagtatgtcagtgttttgaggtttttatttttacttttttactgtcttttgatatagtttctggttacagtagagcatcaaatacctttattgcctgtagagaagagttatttggaaaatgttaccaaatagcttgttctcacaatatgttatgtataaaatagactgtctatgaagatcttgaatctatacacttctccctctcttcattgccaccaccttacttgaaattacgatcatatttcccctggactacattgaaccacacacctttccttaagtatgatttattaaactatatataaacttggatggctgagtttttactgatcttaaagccaagaatcatatctaattatattatccccaaagaaaactaggcacatata

SEQ ID NO: 115 - DNA, 1605 bp, Homo sapiens
cccgcacgcccgggcgcacgccctccccgcccgggccgccctctggctccccgcgcccggcagccagtgcctcaccgcgccgtcccgcgccagggctcgctccgagagccgcttccttctcgccgcggccggcgcgggccccccggccatgcgcccccgagccccagcctgcgccgccgcggcgctcgggctctgcagccttctgctgctgctcgcgcccgggcacgcgtgccccgcgggctgcgcctgcaccgacccgcacaccgtggactgccgcgaccgcgggctgcccagcgtgccagaccctttccccctggacgtgcgcaagctgctggtggccggcaaccgcatccagcggatccccgaggacttcttcatcttctacggcgacctggtctacctggacttcaggaacaactcgctgcgctcgctggaggagggcacgttcagcggctcggccaagctcgtgttcctcgacctcagctacaacaacttgacccagctgggcgccggcgccttccgctcggccgggaggctggtgaagcttagcctggctaacaacaacctggtgggcgtgcacgaggacgccttcgagaccctggagtcgctgcaggtgctggagctcaacgacaacaacctgcgcagcctcagcgtggccgccctggccgcgctgcccgcgctgcgctccctgcgtctggacgggaacccctggctgtgcgactgtgacttcgcccacctcttctcctggatccaggagaacgcatccaaactgcccaaaggccttgatgaaatccagtgctccctgcccatggagagcaggaggatatccctgcgtgagctgtcggargccagcttcagcgagtgtaggttcagcctgtcactcacagacctctgcatcatcattttctccggtgtggccgtgtccattgcggccatcatctccagcttcttcctggccactgtggtgcagtgcctccagaggtgcgcacccaacaaagatgcggaggatgaagacgaggacgaggatgactgagccacctcctccctcctgcctcttactctccagcaccgaaccagaagctctctccaagacgagagggaaatgctgaaaatggaaaagcattggccaccatctgtgaactgaacagagcctgttccgtgtcttggcccctgggtacacctgctgggaccactgatctcagagtttagaatcagcagagcacagaagcccaggaaggatggagggaattattcctggagcataacctgcctctcagatcgaggtgtgtgttgggggagaagatgaccgagtcaggcttcatagctgatgactaaaagcctcccccaggaaatgtgaagactggcagctttcaatggcaaagatgattttacgccattctttttctgacctgtactgsgagatcatgaaacatctgccttcctcccaagaaacagcagctcaaacagtggagattcaaattcggatcattcaccacaagaacgagaactttgatccttatataataggcctcagcaaccttgggatgttatactgggaactaataaactcgtgtgcaatagactcaaaaaaaaaaaaaaaaaaag

SEQ ID NO: 116 - DNA, 1881 bp, Homo sapiens
aggtgccccccactctcgctccattcggcgggagcacccagtcctgtacgccaaggaactggtcctgggggcaccatggtttcggcggcagcccccagcctcctcatccttctgttgctgctcctggggtctgtgcctgctaccgacgcccgctctgtgcccctgaaggccacgttcctggaggatgtggcgggtagtggggaggccgagggctcgtcggcctcctccccgagcctcccgccaccctggaccccggccctcagccccacatcgatggggccccagcccacaaccctggggggcccatcaccccccaccaacttcctggatgggatagtggacttcttccgccagtacgtgatgctgattgctgtggtgggctccctggcctttctgctgatgttcatcgtctgtgccgcggtcatcacccggcagaagcagaaggcctcggcctattacccatcgtccttccccaagaagaagtacgtggaccagagtgaccgggccgggggcccccgggccttcagcgaggtccccgacagagcccccgacagcaggcccgaggaagccctggattcctcccggcagctccaggccgacatcttggccgccacccagaacctcaagtcccccaccagggctgcactgggcggtggggacggagccaggatggtggagggcaggggcgcagaggaagaggagaagggcagccaggagggggaccaggaagtccagggacatggggtcccagtggagacaccagaggcgcaggaggagccgtgctcaggggtccttgagggggctgtggtggccggtgagggccaaggggagctggaagggtctctcttgttagcccaggaagcccagggaccagtgggtccccccgaaagcccctgtgcttgcagcagtgtccaccccagtgtctaacagtcctcccgggctgccagccctgactgtcgggcccccaagtggtcacctccccgtgtatgaaaaggccttcagccctgactgcttcctgacactccctccttggcckccctgtggtgccaatcccagcatgtgctgattctacagcaggcagaawtgctggtccccggtgccccggaggaatcttaccaagtgccatcatccttcacctcagcagccccaaagggctacatcctacagcacagctcccctgacaaagtgagggagggcacgtgtccctgtgacagccaggataaaacatccccaaagtgctgggattacaggcgtgagccaccgtgcccggcccaaactactttttaaaacagctacagggtaaaatcctgcagcacccactctggaaaatactgctcttaattttcctgaaggtggccccctgtttctagttggtccaggattagggatgtggggtatagggcatttaaatcctctcaagcgctctccaagcacccccggcctgggggtgagtttctcatcccgctactgctgctgggatcaggttgaatgaatggaactcttcctgtctggcctccaaagcagcctagaagctgaggggctgtgtttgaggggacctccaccctggggaagtccgaggggctggggaagggtttctgacgcccagcctggagcaggggggccctggccaccccctgttgctcacacattgtctggcagcctgtgtccacaatattcgtcagtcctcgacagggagcctgggctccgtcctgctttagggaggctctggcaggaggtcctctcccccatccctccatctggggctcccccaacctctgcacagctctccaggtgctgagatataatgcaccagcacaataaacctttattccggcaaaaaaaaaaaaaaaaaaattgggggggggccccgtaacccattgg

SEQ ID NO: 117 - DNA, 2717 bp, Homo sapiens
  misc_feature (3)..(3): n equals a,t,g, or c
  misc_feature (10)..(10): n equals a,t,g, or c
ccnccaaggnaacccaagcttaatggcccattggatttaccgcccaaggcttcgaaaatttaacccctccacttaaagggaccaaaaaagttggagstccaccgcggtggcggccgctctagactagtggatcccccgkctgyaggaattcggcacgagccattgcagactctagtgcagtggttcaatctcggctcactgcaacctccgcctccccgattcaagcgattctcctgcgtcagcctccccagtagctgagactacaggatgcagaaagcctcagtgttgctcttcctggcctgggtctgcttcctcttctacgctggcattgccctcttcaccagtggcttcctgctcacccgtttggagctcaccaaccatagcagctgccaagagcccccaggccctgggtccctgccatgggggagccaagggaaacctggggcctgctggatggcttcccgattttcgcgggttgtgttggtgctgatagatgctctgcgatttgacttcgcccagccccagcattcacacgtgcctagagagcctcctgtctccctacccttcctgggcaaactaagctccttgcagaggatcctggagattcagccccaccatgcccggctctaccgatctcaggttgaccctcctaccaccaccatgcagcgcctcaaggccctcaccactggctcactgcctacctttattgatgctggtagtaacttcgccagccacgccatagtggaagacaatctcattaagcagctcaccagtgcaggaaggcgtgtagtcttcatgggagatgatacctggaaagaccttttccctggtgctttctccaaagctttcttcttcccatccttcaatgtcagagacctagacacagtggacaatggcatcctggaacacctctaccccaccatggacagtggtgaatgggacgtgctgattgctcacttcctgggtgtggaccactgtggccacaagcatggccctcaccaccctgaaatggccaagaaacttagccagatggaccaggtgatccagggacttgtggagcgtctggagaatgacacactgctggtagtggctggggaccatgggatgaccacaaatggagaccatggaggggacagtgagctggaggtctcagctgctctctttctgtatagccccacagcagtcttccccagcaccccaccagaggagccagaggtgattcctcaagttagccttgtgcccacgctggccctgctgctgggcctgcccatcccatttgggaatatcggggaagtgatggctgagctattctcagggggtgaggactcccagccccactcctctgctttagcccaagcctcagctctccatctcaatgctcagcaggtgtcccgatttcttcatacctactcagctgctactcaggaccttcaagctaaggagcttcatcagctgcagaacctcttctccaaggcctctgctgactaccagtggcttctccagagccccaagggggctgaggcgacactgccgactgtgattgctgagctgcagcagttcctgcggggagctcgggccatgtgcatcgagtcttgggctcgtttctctctgagcttccttctcctacatctgcttgctgctgggatacccgtcaccacccctggtccttttactgtgccatggcaggcagtctcggcttgggccctcatggccacacagaccttctactccacaggccaccagcctgtctttccagccatccattggcatgcagccttcgtgggattcccagagggtcatggctcctgtacttggctgcctgctttgctagtgggagccaacacctttgcctcccacctcctctttgcagtaggttgcccactgctcctgctctggcctttcctgtgtgagagtcaagggctgcggaagagacagcagcccccagggaatgaagctgatgccagagtcagacccgaggaggaagaggagccactgatggagatgcggctccgggatgcgcctcagcacttctatgcagcactgctgcagctgggcctcaagtacctctttatccttggtattcagattctggcctgtgccttggcagcctccatccttcgcaggcatctcatggtctggaaagtgtttgcccctaagttcatatttgaggctgtgggcttcattgtgagcagcgtgggacttctcctgggcatagctttggtgatgagagtggatggtgctgtgagctcctggttcaggcagctatttctggcccagcagaggtagcctagtctgtgattactggcacttggctacagagagtgctggagaacagtgtagcctggcctgtacaggtactggatgatctgcaagacaggctcagccatactcttactatcatgcagccaggggccgctgacatctaggacttcattattctataattcaggaccacagtggagtatgatccctaactcctgatttggatgcatctgagggacaaggggggcggtctccgaagtggaataaaataggccgggcgtggtgacttgcacctataatcccagcactttgggaggcagaggtgggaggattgcttggtcccaggagttcaagaccagcctgtggaacataacaagaccccgtctctactatttaaaaaaaagtgtaataaaatgataatataattaaaaaaaaaaaaaaaaaaaaactcgagg

SEQ ID NO: 118 - DNA, 1818 bp, Homo sapiens
ctcaaatatgaacttaggggcaaacactttccagaccatgagatgcctgcgaaggatggaggctgccaaggcacaggccagaatctgaataccaaggataaagaggtacttgaggcccagctgcagcagtgctgcatagaagtgctgaggcgcatcccggagccgcatctccatcagtggctcctcttcctcctcgggtctgactctggcatcagcttcattccctgggggctgctgtctcttccgcagcccttgactctcacacaggaaaggccagagcaggagcagtgggcaacctactgcaaagaggaggtgggaggcaaaggtgttggctcccactagcaaagcaggcagccaagtacaggagccatgaccctctgggaatcccacgaaggctgcatgccaatggatggctggaaagacaggctggtggcctgtggagtagaaggtctgtgtggccatgagggcccaagccgagactgcctgccatggcacagtaaaaggaccaggggtggtgacgggtatcccagcagcaagcagatgtaggagaaggaagctcagagagaaacgagcccaagactcgatgcacatggcccgagctccccgcaggaactgctgcagctcagcaatcacagtcggcagtgtcgcctcagcccccttggggctctggagaagccactggtagtcagcagaggccttggagaagaggttctgcagctgatgaagctccttagcttgaaggtcctgagtagcagctgagtaggtatgaagaaatcgggacacctgctgagcattgagatggagagctgaggcttgggctaaagcagaggagtggggctgggagtcctcaccccctgagaatagctcagccatcacttccccgatattcccaaatgggatgggcaggcccagcagcagggccagcgtgggcacaaggctaacttgaggaatcacctctggctcctctggtggggtgctggggaagactgctgtggggctatacagaaagagagcagctgagacctccagctcactgtcccctccatggtctccatttgtggtcatcccatggtccccagccactaccagcagtgtgtcattctccagacgctccacaagtccctggatcacctggtccatctggctaagtttcttggccatttcagggtggtgagggccatgcttgtggccacagtggtccacacccaggaagtgagcaatcagcacgtcccattcaccactgtccatggtggggtagaggtgttccaggatgccattgtccactgtgtctaggtctctgacattgaaggatgggaagaagaaagctttggagaaagcaccagggaaaaggtctttccaggtatcatctcccatgaagactacacgccttcctgcactggtgagctgcttaatgagattgtcttccactatggcgtggctggcgaagttactaccagcatcaataaaggtaggcagtgagccagtggtgagggccttgaggcgctgcatggtggtggtaggagggtcaacctgagatcggtagagccgggcatggtggggctgaatctccaggatcctctgcaaggagcttagtttgcccaggaagggtagggagacaggaggctctctaggcacgtgtgaatgctggggctgggcgaagtcaaatcgcagagcatctatcagcaccaacrcaacccgcgaaaatcgggaagccatccagcaggccccaggtttcccttggctcccccatggcagggacccagggcctgggggctcttggcagctgctatggttggtgagctccaaacgggtgagcag

SEQ ID NO: 119 - DNA, 1984 bp, Homo sapiens
cctgagtgggtgcgccgagtcatggagggcgcagagctggccgggaagatcctttccacctggctgacgctggttctcggcttcatccttttaccttcggtcttcggagtgtctctgggcatctccgagatctacatgaagatcctagtgaaaactttagagtgggccacaatacgaattgaaaaaggaaccccaaaggagtcgattcttaaaaactctgcttctgttggtattatccaaagagatgagtcacccatggaaaaagggctctctggtctacgaggaagggactttgagctgtctgacgtgttttatttctccaagaagggattggaagccattgtagaagatgaagtgacccagaggttttcctcagaggagctagtgtcatggaatctcctcacaagaaccaatgtaaatttccagtacatcagtctgcggctcactatggtgtgggtgctgggcgtcatagtgcgctattgtgtcctactgcctctgaggtaagtcatatgcctggtaatttgatgatacgcttgactcagctttctttttgaatcatgtacataatggccacgtaagtgttctgtggtgcttattccacccattcccacgtaggaaatgccaccwwwywtgacctctaaaggaatgtattacgtatccattttcctttcacaatttttccccaaatgaagttgtatattcagaatccaatgtatatcttagaatctggatccactttgctattagagtctgagctaacttgaggatggagagaaaagggaagtgaagaagaagaagaggaagaggaagaagaagaagagagatcatcaacagtttcatattcactagagcatcagccaaactgtaagagctgaccagaacccactgcctttctttgccagtccatagcacttcataactgcataagagagaaaaaattcttgagtgtggttacacgtgggagagagccatttcgaagtgtgtttgttccatccaattcattgtgatcacggactgctcttattaaagtgtccccacctgggtccccttctgcttctgagcttgagtgccacctggtgaggaggcagtgtcaagcctagtttatggaaagcacgatgtggaacatgagtagaaggcactgcgtggtgggatgaagctgtaagtggctgagatctgattagcgtggtggtagcagtagtaggcacgtataccagccacaacattattgttgatcatcttgcttcatttccctggacatggccttggcatcctctcagcagagctttccaggcargaaawacmtgccaactaaacttggcacatgaattgaaatctttttaccacccccagggtggcctatgcttgcctcattcagatttattaccagggaaagtattgcttaactacagggaaatgcagatttctaagaaattatttctgggttgttgttgttgtttttttttgcccatattgstagttcagacattggggcatagtatgtcttttgggaatcatttcagctgtgataatgaagcgaaattcaaggtttcacatataattttgcttgaaccttaaactagtgcccccaaaacagggttcgtgtactctgggagtgtacaagactatccattggcatgcaggaaggaaatattagagctcttatttactaaaagcttctgttctggctgggtgcagtggctcacgcctgtaatcccagcactttgggaggccgaggtgggcggatcacaagatcaagagatcgagaccatcctggccaacatggtgaaacctcatctctactaaaaatacaaaaattaactgggcgtggtggagcacacctagtctcagctactcgggaggctgagacaggagaatcgcttgaacctgggaggcagaggttgcagtgagctgtgatcgtgccactgcactctagcctggcaacagagcgagactgcgtatccaaaaaaaaaaaaaaaaaaaaaag

SEQ ID NO: 120 - DNA, 1994 bp, Homo sapiens
ccacgcgtccgcctgagtgggtgcgccgagtcatggagggcgcagagctggccgggaagatcctttccacctggctgacgctggttctcggcttcatccttttaccttcggtcttcggagtgtctctgggcatctccgagatctacatgaagatcctagtgaaaactttagagtgggccacaatacgaattgaaaaaggaaccccaaaggagtcgattcttaaaaactctgcttctgttggtattatccaaagagatgagtcacccatggaaaaagggctctctggtctacgaggaagggactttgagctgtctgacgtgttttatttctccaagaagggattggaagccattgtagaagatgaagtgacccagaggttttcctcagaggagctagtgtcatggaatctcctcacaagaaccaatgtaaatttccagtacatcagtctgcggctcactatggtgtgggtgctgggcgtcatagtgcgctattgtgtcctactgcctctgaggtaagtcatatgcctggtaatttgatgatacgcttgactcagctttctttttgaatcatgtacataatggccacgtaagtgttctgtggtgcttattccacccattcccacgtaggaaatgccaccaaacatgacctctaaaggaatgtattacgtatccattttcctttcacaatttttccccaaatgaagttgtatattcagaatccaatgtatatcttagaatctggatccactttgctattagagtctgagctaacttgaggatggagagaaaagggaagtgaagaagaagaagaggaagaggaagaagaagaagagagatcatcaacagtttcatattcactagagcatcagccaaactgtaagagctgaccagaacccactgcctttctttgccagtccatagcacttcataactgcataagagagaaaaaattcttgagtgtggttacacgtgggagagagccatttcgaagtgtgtttgttccatccaattcattgtgatcacggactgctcttattaaagtgtccccacctgggtccccttctgcttctgagcttgagtgccacctggtgaggaggcagtgtcaagcctagtttatggaaagcacgatgtggaacatgagtagaaggcactgcgtggtgggatgaagctgtaagtggctgagatctgattagcgtggtggtagcagtagtaggcacgtataccagccacaacattattgttgatcatcttgcttcatttccctggacatggccttggcatcctctcagcagagctttccaggcaggaaatacctgccaactaaacttggcacatgaattgaaatctttttaccacccccagggtggcctatgcttgcctcattcagatttattaccagggaaagtattgcttaactacagggaaatgcagatttctaagaaattatttctgggttgttgttgttgtttttttttgcccatattgctagttcagacattggggcatagtatgtcttttgggaatcatttcagctgtgataatgaagcgaaattcaaggtttcacatataattttgcttgaaccttaaactagtgcccccaaaacagggttcgtgtactctgggagtgtacaagactatccattggcatgcaggaaggaaatattagagctcttatttactaaaagcttctgttctggctgggtgcagtggctcacgcctgtaatcccagcactttgggaggccgaggtgggcggatcacaagatcaagagatcgagaccatcctggccaacatggtgaaacctcatctctactaaaaatacaaaaattaactgggcgtggtggagcacacctagtctcagctactcgggaggctgagacaggagaatcgcttgaacctgggaggcagaggttgcagtgagctgtgatcgtgccactgcactctagcctggcaacagagcgagactgcgtatccaaaaaaaaaaaaaaaaaaaaaa

SEQ ID NO: 121 - DNA, 948 bp, Homo sapiens
ccacgcgtccgcggacgcgtgggttctaatctcactacaatatgtaacattggtgttcgatctcaagtatttctgaatatattcccctatccacagaaatatactctgggggaaaaaaaatagaacaaattcttgccgtcctgaccattgaacaagagactaattagacaatggggctagaaaaacctcaaagtaaactggaaggaggcatgcatccccagctgataccttcggttattgctgtagttttcatcttacttctcagtgtctgttttattgcaagttgtttggtgactcatcacaacttttcacgctgtaagagaggcacaggagtgcacaagttagagcaccatgcaaagctcaaatgcatcaaagagaaatcagaactgaaaagtgctgaagggagcacctggaactgttgtcctattgactggagagccttccagtccaactgctattttcctcttactgacaacaagacgtgggctgagagtgaaaggaactgttcagggatgggggcccatctgatgaccatcagcacggaagctgagcagaactttattattcagtttctggatagacggctttcctatttccttggacttagagatgagaatgccaaaggtcagtggcgttgggtggaccagacgccatttaacccacgcagagtattctggcataagaatgaacccgacaactctcagggagaaaactgtgttgttcttgtttataaccaagataaatgggcctggaatgatgttccttgtaactttgaagcaagtaggatttgtaaaatacctggaacaacattgaactagaaactcagaaagtggtccttgtgatggaaagagaaaagaaaaaccaattagaataaggcagaatgtacgtgcgtcattggaacacagaaaacatgctggttcatacaaaaaaaaaaaaaaaaaaaaaaaa

SEQ ID NO: 122 - DNA, 923 bp, Homo sapiens
cggacgcgtgggttctaatctcactacaatatgtaacattggtgttcgatctcaagtatttctgaatatattcccctatccacagaaatatactctgggggaaaaaaaatagaacaaattcttgccgtcctgaccattgaacaagagactaattagacaatggggctagaaaaacctcaaagtaaactggaaggaggcatgcatccccagctgataccttcggttattgctgtagttttcatcttacttctcagtgtctgttttattgcaagttgtttggtgactcatcacaacttttcacgctgtaagagaggcacaggagtgcacaagttagagcaccatgcaaagctcaaatgcatcaaagagaaatcagaactgaaaagtgctgaagggagcacctggaactgttgtcctattgactggagagccttccagtccaactgctattttcctcttactgacaacaagacgtgggctgagagtgaaaggaactgttcagggatgggggcccatctgatgaccatcagcacggaagctgagcagaactttattattcagtttctggatagacggctttcctatttccttggacttagagatgagaatgccaaaggtcagtggcgttgggtggaccagacgccatttaacccacgcagagtattctggcataagaatgaacccgacaactctcagggagaaaactgtgttgttcttgtttataaccaagataaatgggcctggaatgatgttccttgtaactttgaagcaagtaggatttgtaaaatacctggaacaacattgaactagaaactcagaaagtggtccttgtgatggaaagagaaaagaaaaaccaattagaataaggcagaatgtacgtgcgtcattggaacacagaaaacatgctggttcatacaaaaaaaaaa

SEQ ID NO: 123 - DNA, 965 bp, Homo sapiens
ggaattcccgggtcgacccacgcgtccgcggacgcgtgggttctaatctcactacaatatgtaacattggtgttcgatctcaagtatttctgaatatattcccctatccacagaaatatactctgggggaaaaaaaatagaacaaattcttgccgtcctgaccattgaacaagagactaattagacaatggggctagaaaaacctcaaagtaaactggaaggaggcatgcatccccagctgataccttcggttattgctgtagttttcatcttacttctcagtgtctgttttattgcaagttgtttggtgactcatcacaacttttcacgctgtaagagaggcacaggagtgcacaagttagagcaccatgcaaagctcaaatgcatcaaagagaaatcagaactgaaaagtgctgaagggagcacctggaactgttgtcctattgactggagagccttccagtccaactgctattttcctcttactgacaacaagacgtgggctgagagtgaaaggaactgttcagggatgggggcccatctgatgaccatcagcacggaagctgagcagaactttattattcagtttctggatagacggctttcctatttccttggacttagagatgagaatgccaaaggtcagtggcgttgggtggaccagacgccatttaacccacgcagagtattctggcataagaatgaacccgacaactctcagggagaaaactgtgttgttcttgtttataaccaagataaatgggcctggaatgatgttccttgtaactttgaagcaagtaggatttgtaaaatacctggaacaacattgaactagaaactcagaaagtggtccttgtgatggaaagagaaaagaaaaaccaattagaataaggcagaatgtacgtgcgtcattggaacacagaaaacatgctggttcatacaaaaaaaaaaaaaaaaaaaaaaaa

SEQ ID NO: 124 - DNA, 623 bp, Homo sapiens
  misc_feature (554)..(554): n equals a,t,g, or c
  misc_feature (559)..(559): n equals a,t,g, or c
  misc_feature (563)..(563): n equals a,t,g, or c
  misc_feature (593)..(593): n equals a,t,g, or c
ggctgcgagtgtccagacatccttgtggaaccagcgttgtttttccttggcagctgcggagacccgtrataattcgttaactaattcaacaaacgggacccttctgtgtgccagaaaccgcaagcagttgctaacccagtgggacaggcggattggaagagcgggaaggtcctggcccagagcagtgtgacacttccctctgtgaccatgaaactctgggtgtctgcattgctgatggcctggtttggtgtcctgagctgtgtgcaggccgaattcttcacctctattgggcacatgactgacctgatttatgcagagaaagagctggtgcagtctctgaaagagtacatccttgtggaggaagccaagctttccaagattaagagctgggccaacaaaatggaagccttgactagcaagtcagctgctgatgctgagggctacctggctcaccctgtgaatgcctacmaactggtgaagcggctaaacacagactggcctgcgctggaggaccttgcctgcaggactcagctgcaggttttatcgccaacctntctgngcancggcaagttctttcccactgatgaaggacnagataggagctggccaaagcccctgatgaa

SEQ ID NO: 125 - DNA, 169 bp, Homo sapiens
aaatttttttcccttttttcccttttttttttttggccyttttttttttttggggtttccccaaaaaaaaatttcccccccccaaaaaaaaaaaaaaaaaaaaaaaaaaaaaaaaaaaaaaaaaaaaaaaaaaaaaaaaaaaaaaaaaaaaaaaaaaaaaaaaaaaaag

SEQ ID NO: 126 - DNA, 832 bp, Homo sapiens
  misc_feature (770)..(770): n equals a,t,g, or c
  misc_feature (829)..(829): n equals a,t,g, or c
caagaacatccgggagcagggccgcttcctgcaggacgtgttcaccacgctggtggacctcaagtggccacacacattgctcatcttcaccatgtccttcctgtgcagctggctgctcttcgccatggcctggtggctcatcgccttcgcccacggtgacctggcccccagcgagggcactgctgagccctgtgtcaccagcatccactccttctcgtctgccttccttttctccattgaggtccaagtgactattggctttggggggcgcatggtgactgaggagtgcccactggccatcctgatcctcatcgtgcagaacatcgtggggctcatgatcaacgccatcatgcttggctgcatcttcatgaagactgcccaagcccaccgcagggctgagaccctcatcttcagcaagcatgcggtgatcgctctgcgccacggccgcctctgcttcatgctacgtgtgggtgacctccgcaagagcatgatcatcagcgccaccatccacatgcaggtggtacgcaagaccaccagccscgagggcgaggtggtgcccctccaccaggtggacatccccatggagaacggcgtgggtggcaacagcatcttyctggtggccccgctgatcatctaccatgtcattgatgccaacagcccactctacgacstggcacccagcgacctgcaccaccaccaggacctcgagatcatcgtcatcctggaaggcgtggtggaaaccacgggcatcaccacccaggcccgacctnctacctggcgatgagatctgtggrgccagcgctttgtgcccattgtagctgaagaggangga

SEQ ID NO: 127 - DNA, 1334 bp, Homo sapiens
gctttgtgcccattgtagctgaggaggacggacgttactctgtggactactccaagtttggcaacaccrtcaaagtgcccacaccactctgcacggcccgccagcttgatgaggaccacagcctactggaagctctgaccctcgcctcagcccgcgggcccctgcgcaagcgcagcgtgcccatggccaaggccaagcccaagttcagcatctctccagattccctgtcctgagccatggtctctcgggccccccacacgcgtgtgtacacacggaccatgtggtatgtagcccrgccagggcctggtgtgaggctgggccagcctcagctcagcctccccctgctgctcatccagggtgttacaaggcacttgtcactatgctatttctggcctcagcaggaacctgtactgggttatttttgtccctgctcctcccaacccaatttaggactggctcacccctctcccccgcccaaggctgcagaggctgtgggaggtactgggccctagagctgtgcgtccagccagtcctgggtccccacgattgaccagccacactctgggccggtggctggggaagaacaatccccgagggctgctgctttgcgtctgtggctccaagaagtgcctgtggtcaggccccagctctacttggtccctgaaaaagcacccggctaagggctgggcctggccagcagggagggcagttgatgagagagggtgttcccgctggagggttggtgctgtggagcctacaccggcagggacagcctggggctgacagggctcccctccgagggccagtttcaggtctggaaggggaggaagcaggggaaggtgacctgaggaggctcggctttgtagagccccgctcaggcacagggaggaggagatgccagggctcctgccttttgccacatcggcctcgtgcagtgagggctctgtgggctggggctgctgcccctgcctacctcctgcctgtccccagaggctgaggagagggggtactgtgcccaccacacatgattaggcctcagacccaactctggtcctggctccacaacagtggctgccactcactttgtccagaaggtggcttgggggtggatatctttgggttgctggaaaaggtgtgggaaggttcaggatggtgggagggactgaggtccctgaggtgaagaggcccttggtcctgacgggtttgacccgtgcctggacccttggagcagtgttgtgtgaacttgcctagaactctgccttctccgttgtcaataaagcctccccctcatgaccwaaaaaaaaaaaaaaaaaaaaaaaaaaaagtcgtatcga

SEQ ID NO: 128 - DNA, 543 bp, Homo sapiens
ctcaacaggtgattggcccagagaggggaggtgaccccaggccccaggaaagggagcgaggacagcgctggttcccggctccccgcaccatcatggctttgcctctgaggcccctgacccggggcttggccagcgctgccaaaggaggccacggaggagcaggagctcgtacctggcgtctgctgaccttcgtgctggcgctgcccagcgtggccctctgcaccttcaactcctatctccactcgggccaccgcccgcgccccgagttccgtccctaccaacacctccgcatccgcaccaagccctacccctggggggacggcaaccacactctgttccacaatagccacgtgaaccctctgcccacgggctacgaacacccctgaggccccggacgcccccggacacaataaaggtgtgaagcttcraaaaaaaaaaaaaaaaaaaaaaaaaaaaaaaaaaaaaaaaaaaaaaaaaaaaaaaaaaaaaaaaaaaaaaaaaaaaaaaaaaaaaaaaaaaaaaaaaaaaaaaaaaaaaaaaaaa

SEQ ID NO: 129 - DNA, 876 bp, Homo sapiens
ccacgcgtccggcccggcgggcccgcgagtccgagacctgtcccaggagctccagctcacgtgacctgtcactgcctcccgccgcctcctgcccgcgccatgacccagccggtgccccggctctccgtgcccgccgcgctggccctgggctcagccgcactgggcgccgccttcgccactggcctcttcctggctgaccctggagcagccgcagggggattctatgatgacctgcgagcaggcccagctcttggccaacctggcgcggctcatccaggccaagaaggcgctggacctgggcaccttcacgggctactccgccctggccctggccctggcgctgcccgcggacgggcgcgtggtgacctgcgaggtggacgcgcagcccccggagctgggacggcccctgtggaggccgaggcggagcacaagatcgacctccggctgaagcccgccttggagaccctggacgagctgctggcggcgggcgaggccggcaccttcgacgtggccgtggtggatgcggacaaggagaactgctccgcctactacgagcgctgcctgcagctgctgcgacccggaggcatcctcgccgtcctcagagtcctgtggcgcgggaaggtgctgcaacctccgaaaggggacgtggcggccgagtgtgtgcgaaacctaaacgaacgcatccggcgggacgtcagggtctacatcagcctcctgcccctgggcgatggactcaccttggccttcaagatctagggctggcccctagtgagtgggctcgagggagggttgcctgggaaccccaggaattgaccctgagttttaaattcgaaaataaagtggggctgggacacacgaaaaaaaaaaaaaaaaaaa

SEQ ID NO: 130 - DNA, 640 bp, Homo sapiens
ctttgctaagcgttcgtgagtatgtgtgtaaacacatacaatctgtgaatgaaaattgtgaccctcgttttgcacttttcgggccaacgagccaaaagatttgcccagaagtaaacagctagttagtgacttctgatttccatccatggtggttgtacttcctcaggaataaaaatgaatattctatattcttcttatgcccctctgggttttccttttcctctgggcccctcagactctagctgcaacagcaaggaaactggaacggaatcaaattgaatttgccttaaaatgcttttatggagacaaaatgataactaaacgtaaggaggtaggtaatagaggccgggcacggtggctcacgcctgtaattccagcaatttgggaggtcgaggtgggtggatcacctgaggtcaggaggtcgagaccagcctggccaatatggtgatgccctgtctctgctaaaaatacaaaaattagccaggcgtggtggtgcacacctataatcctagctacttgggaggctgaggcaggagaatcgcttgaaccccgggggcggaggttatagtgagccaagatcgccccacttcaccacagcctgggtgaaagagtgaaactccgtcaaaaaaaaaaaaaaaag

SEQ ID NO: 131 - DNA, 2717 bp, Homo sapiens; identical to SEQ ID NO: 117
  misc_feature (3)..(3): n equals a,t,g, or c
  misc_feature (10)..(10): n equals a,t,g, or c

SEQ ID NO: 132 - DNA, 413 bp, Homo sapiens
tgcttaatgagattgtcttccactatggcgtggctggcgaagttactaccagcatcaataaaggtaggcagtgagccagtggtgagggccttgaggcgctgcatggtggtggtaggagggtcaacctgagatcggtagagccgggcatggtggggctgaatctccaggatcctctgcaaggagcttagtttgcccaggaagggtagggagacaggaggctctctaggcacgtgtgaatgctggggctgggcgaagtcaaatcgcagagcatctatcagcaccaacacaacccgcgaaaatcgggaagccatccagcaggccccaggtttcccttggctcccccatggcagggacccagggcctgggggctcttggcagctgctatggttggtgagctccaaacgggtgagcag

SEQ ID NO: 133 - DNA, 451 bp, Homo sapiens
tgttggtgtcaccactgctttgggggaaatggctgggatgaggctaatacattcatgcaatatttatattttcagggggctgcgttatcagcatgctctccctgccttgggcttttctttccgtcatgttttccttttcgtgttccttctctgatttctcttgtctctgctgctcacaggcctgcccatcagtcagtacagatactcagtgtctggtttctggccagctccgtggagggggctttaagcagaattctgactctttggggtgggggattaggaactgggggaaacttaatgatccagagattcccccaagaggagtgtctggaaggatctgtgcctggacagtggcagaacctttccagtgttcttttggttctgatttcatcagtctcaataaagttccgatctctctttaaaaaaaaaaaaaaaaaaaaaaaaaaaaaag

SEQ ID NO: 134 - DNA, 579 bp, Homo sapiens
cccctgccaagtcgcacctggggcttccctggccaccttgggtcctcaggtacaattgccctgcagggcactggcctgtggcmcacagcagcaggccctgcagcccagattcccccagcaagcgaatgaggcatagctgaaaaccgtgcccatggtggcctcagtccmcmcagggtggacccagccctggacaggcatgtggctccccccaaccctgagcaggcagccctgcctcctgagtgcmcctgccmcgcccagggcttacgtcarctggggggactggggcagcctctttgaagaatgcagctcattgtcagcgatggggcaggattccttcgcaatggccccmcccagaggcaagtctgtccaggcggacaagggcagctgagtgaggcgccctaggaagtttgaccccctytgccctgtgatggtccagcagctccaggaaaaaggrccagagtacccmttgccccctgrccttgcaaccmcmcmcmcgtgkwcttttataatagagaaaaaaaaaaacatgttataaaaccaaaaaaaaaaaaaaaaaaaaaaaaaaaaaaaaaaaaaaag

SEQ ID NO: 135 - DNA, 2069 bp, Homo sapiens
  misc_feature (2037)..(2037): n equals a,t,g, or c
ggccgcgcctgcgcctccgctcgcctgtggctgcgtcgcgcgctcttcctcggagctacccaggcggctggtgtgcagcaagctccgcgccgaccccggacgcctgacgcctgacgcctgtacccggcccsgcatgagccgctacctgctgccgctgtcggcgctgggcacggtagcaggcgccgccgtgctgctcaaggactatgtcaccggtggggcttgccccagcaaggccaccatccctgggaagacggtcatcgtgacgggcgccaacacaggcatcgggaagcagaccgccttggaactggccaggagaggaggcaacatcatcctggcctgccgagacatggagaagtgtgaggcggcagcaaaggacatccgcggggagaccctcaatcaccatgtcaacgcccggcacctggacttggcttccctcaagtctatccgagagtttgcagcaaagatcattgaagaggaggagcgagtggacattctaatcaacaacgcgggtgtgatgcggtgcccccactggaccaccgaggacggcttcgagatgcagtttggcgttaaccacctgggtcactttctcttgacaaacttgctgctggacaagctgaaagcctcagccccttcgcggatcatcaacctctcgtccctggcccatgttgctgggcacatagactttgacgacttgaactggcagacgaggaagtataacaccaaagccgcctactgccagagcaagctygccatcgtcctcttcaccaaggagctgagccggcggctgcaaggctctggtgtgactgtcaacgccctgcaccccggcgtggccaggacagagctgggcagacacacgggcatccatggctccaccttctccagcaccacactcgggcccatcttctggctgctggtcaagagccccgagctggccgcccagcccagcacatacctggccgtggcggaggaactggcggatgtttccggaaagtacttcgatggactcaaacagaaggccccggcccccgaggctgaggatgaggaggtggcccggaggctttgggctgaaagtgcccgcctggtgggcttagaggctccctctgtgagggagcagcccctccccagataacctctggagcagatttgaaagccaggatggcgcctccagaccgaggacagctgtccgccatgcccgcagcttcctggcactacctgagccgggagacccaggactggcggccgccatgcccgcagtaggttctagggggcggtgctggccgcagtggactggcctgcaggtgagcactgccctgggctctggctggttccgtctgctctgctgccagcaggggagaggggccatctgatgcttcccctgggaatctaaactgggaatggccgaggaggaaggggctccgtgcacttgcaggccacgtcaggagagccagcggtgcctgtcggggagggttccaaggtgctccgtgaagagcatgggcaagttgtctgacacttggtggattcttgggtccctgtgggaccttgtgcatgcatggtcctctctgagccttggtttcttcagcagtgagatgctcagaataactgctgtctcccatgatggtgtggtacagcgagctgttgtctggctatggcatggctgtgccgggggtgtttgctgagggcttcctgtgccagagcccagccagagagcaggtgcaggtgtcatcctgagttcaggctctgcacggcatggagtgggaaccccaccagctgctgctacaggacctgggattgcctgggactcccaccttcctatcaattctcatggtagtccaaactgcagactctcaaacttgctcatttaaaagaaaaaaaaaagaagaaaatgtacccgagtcgtagattttatttttcctctgtgcatgggtgaatgcccatgagctgaacaaaggcaactcatggctttattccttttaggaaacaaggcatcagtttatcaccagggcaacaggccatgcaaaagttcagacttggccgggncggtggatcacgagtcagagatgagccatctg

SEQ ID NO: 136 - DNA, 1227 bp, Homo sapiens
tccgggtggtggactggattcgctgcggagccctggaagctgcctktccttctccctgtgcttaaccagaggtgcccatgggttggacaatgaggctggtcacagcagcactgttactgggtctcatgatggtggtcactggagacgaggatgagaacagcccgtgtgcccatgaggccctcttggacgaggacaccctcttttgccagttcagggctcccagactcgagtcaagggggcccattctcaggactcccagaatacaccagcaggcccccagtctgagaaagagacttatgaccttaaggttgcatgccaggaagatgtcttttgatttcaagccatcatcgcaaaagaggagctttgtctttattgtcactgaagatttttgttaggaagagagcatcatgaatgatgatgaaatgaaaaatgcatcaaggacagatcggacccctgaggagacagcaggacctcctgcactgacccctcctcaagatccccactcggctcaggctctgaccttggcaagagatcccccagagaaggcactcctcttgtgggcatttgktctaccagggaactcttaaagattggactcaatgcctaaaggtattaatctataagggaggaattytatgtactgtgacaagctgtgagacattgttaagagtaacgcttctcgggaatcagaccttccctgcttctgagataccccagacaagaccagcaaaaccaccgacggtcccaaccctgggctcagtcgcagaatggaaagaaccatgattctccaaacctgcagccaggaggtgaatccactcaaaaaaccccacctgctgctgccatccagtcagccctgcaagctcccctagggatgggagctgctgctcaaagcgtcctgctttttggtgttgaaaagctccgttcttcagaaagtacattcttaccccgaggccctgctgctcttcttgaacaccaaccctacctgttgtagtgcggatccacgaggtgcacaaactagtctagtttctcatcttctttgtggtcattcatgtgtgtggtgacaggtgccatgccctgccctgccccttcatccccagctccccccaacctgggcagtcatccccagtccttcaacctctctcaggggccttggtctctcctgtttaaatacatttcttttagagmcaaaaaaaaaraaaaaaaaaaaaaaaaaaaaaaagtcgacgc

SEQ ID NO: 137 - DNA, 1022 bp, Homo sapiens
ccctcccagagaacgtctgcaacatcgtggtggcctacctctccaccgagctgacccgccagaccctggacctcctgggcctcatcaaccagttctccaccttcttcaagggcgccatcaccccagtgctgctcctttgcatctgcaggccgctgggccaggccttcctggactgctgctgctgctgctgctgtgaggagtgcggcggggcttcggaggcctctgctgccaatgggtcggacaacaagctcaagaccgaggtgtcctcttccatctacttccacaagcccagggagtcacccccactcctgcccctgggcacaccttgctgaggccccagtaggggtggggagggagggagaggccgccacccccgccggtgtctgctgttctttccccataggtcttgctttgttgcctgtcttgctgtctagggatggacttggttcctcttgtcaaggtttgggaatgtcaaagccccctccccacacagggcctttcctgtcccttgtggggccttccaaccctgtcctttccactggtgggcggtgatgcttctaggtccttagaactgcccagaaactctgagtcccagcagctgggagccagaactttgcctgccctcccttggttccagtctctcttctctctctctgccttggaacctgaccatactttagttgtgcccttcccaggcatcatcctcctaccaccaacctggggccccatcttggaatgggggctccttggggccagcccagtgtggctcaccacactcttcttttttttttttttttttttgagatggagtcttgctctgttgcccaggctggagtacatttgcctgatgtcagctccctgcaacctccgcctcctgggttcaagcgattctcctgcctcagcctcctgagtagctgggattacaggtgtgcaccaacacacccggctaatttttgtatttgtagaagargcggggtttcaccawgttggscargctggtgttgaatcctgacctcaagtga

SEQ ID NO: 138 - DNA, 228 bp, Homo sapiens
gatctgtcccagtcctggatgcctcctcctcctggkgccttyttttyttccagaggatttytytytccttcctcctcctttytttgggatccctgggttgccctgtcccamcctccttgttaggtgctttcccataggaggcccttyttgagaaacaataaaytaggtwgamctaaaaaaaaaaaaaaaaaaaaaaaaaaaaaaaaaaaaaaaaaaaaaaaaaaacag

SEQ ID NO: 139 - DNA, 932 bp, Homo sapiens
  misc_feature (847)..(847): n equals a,t,g, or c
  misc_feature (855)..(855): n equals a,t,g, or c
  misc_feature (874)..(874): n equals a,t,g, or c
gcccgggaccacggctgccagccccactgctacacccatacaccatctcccaccgagagtcatggccccattggccctgcacctcctcgtcctcgtccccatcctcctcagcctggtggcctcccaggactggaaggctgaacgcagccaagaccccttcgagaaatgcatgcaggatcctgactatgagcagctgctcaaggtggtgacctgggggctcaatcggaccctgaagccccagagggtgattgtggttggcgctggtgtggccgggctggtggccgccaaggtgctcagcgatgctggacacaaggtcaccatcctggaggcagataacaggatcgggggccgcatcttcacctaccgggaccagaacacgggctggattggggagctgagccatgcgcatgcccagctctcacaggatcctccacaagctctgccagggcctggggctcaacctgaccaagttcacccagtacgacaagaacacgtggacggaggtgcacgaagtgaagctgcgcaactatgtggtggagaaggtgcccgagaagctgggctacgccttgcgtccccaggaaaagggccactcgcccgaagacatctaccagatggctctcaaccaggccctcaaagacctcaaggcactgggctgcagaaaggcgatgaagaagtttgaaaggcacacgctcttggaatatcttctcggggaggggaacctgagccggccggccgtgcagcttctgggagacgtgatgtccgaggatggcttcttctatctyagcttcgccgaggccctccggcccacagctgcctcagcgacagactccagtacagccgcatcgtnggtggctnggactgctgccgcgcgcgntgctgagtcgtgtccgggttttgtgttgaagcgccttgttggcatgaccaggacgcag

SEQ ID NO: 140 - DNA, 1745 bp, Homo sapiens
agacagtggagggcagtggagaggaccgcgctgtcctgctgtcaccaagagctggagacaccatctcccaccgagagtcatggccccattggccctgcacctcctcgtcctcgtccccatcctcctcagcctggtggcctcccaggactggaaggctgaacgcagccaagaccccttcgagaaatgcatgcaggatcctgactatgagcagctgctcaaggtcaccatcctggaggcagataacaggatcgggggccgcatcttcacctaccgggaccagawyacgggctggattggggagctgggagccatgcgcatgcccagctctcacaggatcctccacaagctctgccagggcctggggctcaacctgaccaagttcacccagtacgacaagaacacgtggacggaggtgcacgaagtgaagctgcgcaactatgtggtggagaaggtgcccgagaagctgggctacgccttgcgtccccaggaaaagggccactcgcccgaagacatctaccagatggctctcaaccaggccctcaaagacctcaaggcactgggctgcagaaaggcgatgaagaagtttgaaaggcacacgctcttggaatatcttctcggggaggggaacctgagccggccggccgtgcagcttctgggagacgtgatgtccgaggatggcttcttctatctcagcttcgccgaggccctccgggcccacagctgcctcagcgacagactccagtacagccgcatcgtgggtggctgggacctgctgccgcgcgcgctgctgagctcgctgtccgggcttgtgctgttgaacgcgcccgtggtggcgatgacccagggaccgcacgatgtgcacgtgcagatcgagacctctcccccggcgcggaatctgaaggtgctgaaggccgacgtggtgctgctgacggcgagcggaccggcggtgaagcgcatcaccttctcgccgccgctgccccgccacatgcaggaggcgctgcggaggctgcactacgtgccggccaccaaggtgttcctaagcttccgcaggcccttctggcgcgaggagcacattgaaggcggccactcaaacaccgatcgcccgtcgcgcatgattttctacccgccgccgcgcgagggcgcgctgctgctggcctcgtacacgtggtcggacgcggcggcagcgttcgccggcttgagccgggaagaggcgttgcgcttggcgctcgacgacgtggcggcattgcacgggcctgtcgtgcgccagctctgggacggcaccggcgtcgtcaagcgttgggcggaggaccagcacagccagggtggctttgtggtacagccgccggcgctctggcaaaccgaaaaggatgactggacggtcccttatggccgcatctactttgccggcgagcacaccgcctacccgcacggctgggtggagacggcggtcaagtcggcgctgcgcgccgccatcaagatcaacagccggaaggggcctgcatcggacacggccagccccgaggggcacgcatctgacatggaggggcaggggcatgtgcatggggtggccagcagcccctcgcatgacctggcaaaggaagaaggcagccaccctccagtccaaggccagttatctctccaaaacacgacccacacgaggacctcgcattaaagtattttcggaaaaaaaaaaaaaaaaaaaaaaaaaaaaaaaaaaaaaaaaaaaaaaaaaaaaaagggcggcc

SEQ ID NO: 141 - DNA, 627 bp, Homo sapiens
ggtcgacccacgcgtccgggccacagcagagacagtggagggcagtggagaggaccgcgctgtcctgctgtcaccaagagctggagacaccatctcccaccgagagtcatggccccattggccctgcacctcctcgtcctcgtccccatcctcctcagcctggtggcctcccaggactggaaggctgaacgcagccaagaccccttcgagaaatgcatgcaggatcctgactatgagcagctgctcaaggtggtgacctgggggctcaatcggaccctgaagccccagagggtgattgtggttggcgctggtgtggccgggctggtggccgccaaggtgctcagcgatgctggacacaaggtcaccatcctggaggcagataacaggatcgggggccgcatcttcacctaccgggaccagaacacgggctggattggggagctgggagccatgcgcatgcccagctctcacaggatcctccacaagctctgccagggcctggggctcaacctgaccaagttcacccagtacgacaagaacacgtggacggaggtgcacgaagtgaagctgcgcaactatgtggtggagaaggtgcccgagaagctgggctacgccttgcgtccccag

SEQ ID NO: 142 - DNA, 1344 bp, Homo sapiens
gtccgagagaacaggcctgtctcaggcaggccctgcgcctcctatgcggagatgctactgccactgctgctgtcctcgctgctgggcgggtcccaggctatggatgggagattctggatacgagtgcaggagtcagtgatggtgccggagggcctgtgcatctctgtgccctgctctttctcctacccccgacaagactggacagggtctaccccagcttatggctactggttcaaagcagtgactgagacaaccaagggtgctcctgtggccacaaaccaccagagtcgagaggtggaaatgagcacccggggccgatttccaggctcactgggggatcccgccaaggggaactgctccttggtgatcagaagacgcgcagatgcaaggatgagtcacagtacttctttcgggtggagagaggaagctatgtgagatataatttcatgaacgatgggttctttctaaaagtaacagtgctcagcttcacgcccagaccccaggaccacaacaccgacctcacctgccatgtggacttctccagaaagggtgtgagcgcacagaggaccgtccgactccgtgtggcctatgcccccagagaccttgttatcagcatttcacgtgacaacacgccagccctggagccccagccccaggggaaatgtcccatacctggaagcccaaaaaggccagttcctgcggctcctctgtgctgctgacagccagccccctgccacactgagctgggtcctgcagaacagagtcctctcctcgtcccatccctggggccctagacccctggggctggagctgcccggggtgaaggctggggattcagggcgctacacctgccgagcggagaacaggcttggctcccagcagcgagccctggacctctctgtgcagtatcctccagagaacctgagagtgatggtttcccaagcaaacaggacagtcctggaaaaccttgggaacggcacgtctctcccagtactggagggccaaagcctgtgcctggtctgtgtcacacacagcagccccccagccaggctgagctggacccagaggggacaggttctgagcccctcccagccctcagaccccggggtcctggagctgcctcgggttcaagtggagcacgaaggagagttcacctgccacgctcggcacccactgggctcccagcacgtctctctcagcctctccgtgcactactccccgaagctgctgggcccctcctgctcctgggaagctgaaggtctgcactgcaactgctcctcccaggccagcccggccccctctctgcgctggtggcttggggaggagctgctggaaggggaacaa

SEQ ID NO: 143 - DNA, 1644 bp, Homo sapiens
  misc_feature (1625)..(1625): n equals a,t,g, or c
cgacccacgcgtccgccgccttcggcttccccttctgccaagagccctgagccactcacagcacgaccagagaacaggcctgtctcaggcaggccctgcgcctcctatgcggagatgctactgccactgctgctgtcctcgctgctgggcgggtcccaggctatggatgggagattctggatacgagtgcaggagtcagtgatggtgccggagggcctgtgcatctctgtgccctgctctttctcctacccccgacaagactggacagggtctaccccagcttatggctactggttcaaagcagtgactgagacaaccaagggtgctcctgtggccacaaaccaccagagtcgagaggtggaaatgagcacccggggccgattccagctcactggggatcccgccaaggggaactgctccttggtgatcagagacgcgcagatgcaggatgagtcacagtacttctttcgggtggagagaggaagctatgtgagatataatttcatgaacgatgggttctttctaaaagtaacagccctgactcagaagcctgatgtctacatccccgagaccctggagcccgggcagccggtgacggtcatctgtgtgtttaactgggcctttgaggaatgtccacccccttctttctcctggacgggggctgccctctcctcccaaggaaccaaaccaacgacctcccacttctcagtgctcagcttcacgcccagaccccaggaccacaacaccgacctcacctgccatgtggacttctccagaaagggtgtgagcgtacagaggaccgtccgactccgtgtggcctatgcccccagagaccttgttatcagcatttcacgtgacaacacgccakccctsgagccccagccccagggaaatgtcccatacctggaagcccaaaaaggccagttcctgcggctcctctgtgctgctgacagccagccccctgccacactgagctgggtcctgcagaacagagtcctctcctcgtcccatccctggggccctagacccctggggctggasctgcccggggtgaaggctggggattcaggcgctacacctgccgagcggagaacaggcttggctcccagcagcgagccctggacctctctgtgcagtatcctccagagaacctgagagtgatggtttcccaagcaaacaggacagtcctggaaaaccttgggaacggcacgtctctcccagtactggagggccaaagcctgtgcctggtctgtgtcacacacarcagccccccagccaggctgagctggacccagaggggacaggttctgagcccctcccagccctcagaccccggggtcctggagctgcctcgggttcaagtggagcacgaaggagagttcacctgccacgctcggcacccactgggctcccagcacgtctctctcagcctctccgtgcactactccccgaagctgctgggcccctcctgctcctgggargctgarggtctgcactgcarctgctcctcccaggccagcccggccccctctctgcgctggtggcttggggaggagctgctggaagggaacarcagccaggactccttckaggtcaaccccagytcaccgggccytgggcaatanctccctgagcctccatgga

SEQ ID NO: 144 - DNA, 3264 bp, Homo sapiens
aacaggcctgtctcaggcaggccctgcgcctcctatgcggagatgctactgccactgctgctgtcctcgctgctgggcgggtcccaggctatggatgggagattctggatacgagtgcaggagtcagtgatggtgccggaggcctgtgcatctctgtgccctgctctttctcctacccccgacaagactggacagggtctaccccagcttatggctactggttcaaagcagtgactgagacaaccaagggtgctcctgtggccacaaaccaccagagtcgagaggtggaaatgagcacccggggccgattccagctcactggggatcccgccaaggggaactgctccttggtgatcagagacgcgcagatgcaggatgagtcacagtacttctttcgggtggagagaggaagctatgtgagatataatttcatgaacgatgggttctttctaaaagtaacagccctgactcagaagcctgatgtctacatccccgagaccctggagcccgggcagccggtgacggtcatctgtgtgtttaactgggcctttgaggaatgtccacccccttctttctcctggacgggggctgccctctcctcccaaggaaccaaaccaacgacctcccacttctcagtgctcagcttcacgcccagaccccaggaccacaacaccgacctcacctgccatgtggacttctccagaaagggtgtgagcgcacagaggaccgtccgactccgtgtggcctatgcccccagagaccttgttatcagcatttcacgtgacaacacgccagccctggagccccagccccagggaaatgtcccatacctggaagcccaaaaaggccagttcctgcggctcctctgtgctgctgacagccagccccctgccacactgagctgggtcctgcagaacagagtcctctcctcgtcccatccctggggccctagacccctggggctggagctgcccggggtgaaggctggggattcagggcgctacacctgccgagcggagaacaggcttggctcccagcagcgagccctggacctctctgtgcagtatcctccagagaacctgagagtgatggtttcccaagcaaacaggacagtcctggaaaaccttgggaacggcacgtctctcccagtactggagggccaaagcctgtgcctggtctgtgtcacacacagcagccccccagccaggctgagctggacccagaggggacaggttctgagcccctcccagccctcagaccccggggtcctggagctgcctcgggttcaagtggagcacgaaggagagttcacctgccacgctcggcacccactgggctcccagcacgtctctctcagcctctccgtgcactactccccgaagctgctgggcccctcctgctcctgggaggctgagggtctgcactgcagctgctcctcccaggccagcccggccccctctctgcgctggtggcttggggaggagctgctggaggggaacagcagccaggactccttcgaggtcacccccagctcagccgggccctgggccaacagctccctgagcctccatggagggctcagctccggcctcaggctccgctgtgaggcctggaacgtccatggggcccagagtggatccatcctgcagctgccagataagaagggactcatctcaacggcattctccaacggagcgtttctgggaatcggcatcacggctcttcttttcctctgcctggccctgatcatcatgaagattctaccgaagagacggactcagacagaaaccccgaggcccaggttctcccggcacagcacgatcctggattacatcaatgtggtcccgacggctggccccctggctcagaagcggaatcagaaagccacaccaaacagtcctcggacccctcttccaccaggtgctccctccccagaatcaaagaagaaccagaaaaagcagtatcagttgcccagtttcccagaacccaaatcatccactcaagccccagaatcccaggagagccaagaggagctccattatgccacgctcaacttcccaggcgtcagacccaggcctgaggcccggatgcccaagggcacccaggcggattatgcagaagtcaagttccaatgagggtctcttaggctttaggactgggacttcggctagggaggaaggtagagtaagaggttgaagataacagagtgcaaagtttccttctctccctctctctctctctttctctctctctctctctttctctctcttttaaaaaaacatctggccagggcacagtggctcacgcctgtaatcccagcactttgggaggttgaggtgggcagatcgcctgaggtcgggagttcgagaccagcctggccaacttggtgaaaccccgtctctactaaaaatacaaaaattagctgggcatggtggcaggcgcctgtaatcctacctacttgggaagctgaggcaggagaatcacttgaacctgggagacggaggttgcagtgagccaagatcacaccattgcacgccagcctgggcaacaaagcgagactccatctcaaaaaaaaaatcctccaaatgggttgggtgtctgtaatcccagcactttgggaggctaaggtgggtggattgcttgagcccaggagttcgagaccagcctgggcaacatggtgaaaccccatctctacaaaaaatacaaaacatagctgggcttggtggtgtgtgcctgtagtcccagctgtcagacatttaaaccagagcaactccatctggaataggagctgaataaaatgaggctgagacctactgggctgcattctcagacagtggaggcattctaagtcacaggatgagacaggaggtccgtacaagatacaggtcataaagactttgctgataaaacagattgcagtaaagaagccaaccaaatcccaccaaaaccaagttggccacgagagtgacctctggtcgtcctcactgctacactcctgacagcaccatgacagtttacaaatgccatggcaacatcaggaagttacccgatatgtcccaaaagggggaggaatgaataatccaccccttgtttagcaaataagcaagaaataaccataaaagtgggcaaccagcagctctaggcgctgctcttgtctatggagtagccattcttttgttcctttactttcttaataaacttgctttcaccttacaaaaaaaaaaaaaaaaaaaaaaaaaaaaaaaaaaaaaaaaaaaaaaaaaa

SEQ ID NO: 145 - DNA, 922 bp, Homo sapiens
  misc_feature (6)..(6): n equals a,t,g, or c
aacggnaaaatctccccttactattgggaacaaaagctggagctccaccgcggtggcggccgctctagaactagtggatcccccgggctgcaggaattcggcacgagccgaggaagagcgttttggggacgggggctggtgaggctcacgttggagggcttcgcgtctgcttcggagaccgtaaggatattgatgaccatgagatccctgctcagaacccccttcctgtgtggcctgctctgggccttttgtgccccaggcgccagggctgaggagcctgcagccagcttctcccaacccggcagcatgggcctggataagaacacagtgcacgaccaagagcatatcatggagcatctagaaggtgtcatcaacaaaccagaggcggagatgtcgccacaagaattgcagctccattacttcaaaatgcatgattatgatggcaataatttgcttgatggcttagaactctccacagccatcactcatgtccataaggaggaagggagtgaacaggcaccactaatgagtgaagatgaactgattaacataatagatggtgttttgagagatgatgacaagaacaatgatggatacattgactatgctgaatttgcaaaatcactgcagtagatgttatttggccatctcctggttatatacaaatgtgacccgtgataatgtgattgaacactttagtaatgcaaaataactcatttccaactactgctgcagcattttggtaaaaacctgtagcgattcgttacactggggtgagaagagataagagaaatgaaagagaagagaaatgggacatctaatagtccctaagtgctattaaataccttattggacaaggaaaaaaaaaaaaaaaaaactcgagsgggggcccggtacccaattcggggtatgtgccgttggt

SEQ ID NO: 146 - DNA, 665 bp, Homo sapiens
ccacgcgtccgaaaacagatgtgaggatgatcttattctaagagctgtgcattgtgttccagccccaggttgtctgatactttcctttcttatctcccacctggctcatggcctctcctgcatcagtagtgcctgctgtgggcttcctgaggctgcacagcatgcttctcattgcttgtccgccacatgcttctctggggcttcctctccatgtccgccagcagcctgttgagctaaggcaccttccctttccttgttgctcttctctttctccactttcttcttgggcatacagggtcttgcccttttgcccatgctggagtacagtggcacaatcacggcttactgcagcctcaacctcccagactcaagtggtcctcccacctcagccccatccccgaccccctcagcctcccaaagtgcttgcattacagacgtgagccacacgttaaatcttcgtaataaccctttgatgtaggttttgtcattatctccatttttacatgagactactgaaacacacagttaatccttcttgtaacttgcccaacgtgtcacagctgattcattggaacagctagtcaagcagcagattacagaattaatgaactgaaaaaaattacacagaatataaaatagaaagataaagaaaaaaaaaaaaaaaa

SEQ ID NO: 147 - DNA, 1142 bp, Homo sapiens
aagagctgctggtcagagcacttcctggaacttgctattggtcaggacgtttcctatgctaataaaggggtggcccgtagaagattccagcaccctcccctaactccaggccagactcctttcagctaaaggggagatctggatggcatctacttcgtatgactattgcagagtgcccatggaagacggggataagcgctgtaagcttctgctggggataggaattctggtgctcctgatcatcgtgattctgggggtgcccttgattatcttcaccatcaaggccaacagcgaggcctgccgggacggccttcgggcagtgatggagtgtcgcaatgtcacccatctcctgcaacaagagctgaccgaggcccagaagggctttcaggatgtggaggcccaggccgccacctgcaaccacactgtgatggccctaatggcttccctggatgcagagaaggcccaaggacaaaagaaagtggaggagcttgagggagagatcactacattaaaccataagcttcaggacgcgtctgcagaggtggagcgactgagaagagaaaaccaggtcttaagcgtgagaatcgcggacaagaagtactaccccagctcccaggactccagctccgctgcggcgccccagctgctgattgtgctgctgggcctcagcgctctgctgcagtgagatcccaggaagctggcacatcttggaaggtccgtcctgctcggcttttcgcttgaacattcccttgatctcatcagttctgagcgggtcatggggcaacacggttagcggggagagcacggggtagccggagaagggcctctggagcaggtctggaggggccatggggcagtcctgggtgtggggacacagtcgggttgacccagggctgtctccctccagagcctccctccggacaatgagtcccccctcttgtctcccaccctgagattgggcatggggtgcggtgtggggggcatgtgctgcctgttgttatgggttttttttgcggggggggttgcttttttctggggtctttgagctccaaaaaataaacacttcctttgagggagagcacaccttaaaaaaaaaaaaaaaaaaaaaaaaaaaaaaaaaaaaaaaaaaaagggcggccgct

SEQ ID NO: 148 - DNA, 1148 bp, Homo sapiens
  misc_feature (1013)..(1013): n equals a,t,g, or c
  misc_feature (1109)..(1109): n equals a,t,g, or c
  misc_feature (1141)..(1141): n equals a,t,g, or c
cgggtcgacccacgcgtccgcaggcgcttaggggctgaggcgcgatggcaggtgtcggggctgggcctctgcgggcgatggggcggcaggccctgctgcttctcgcgctgtgcgccacaggcgcccaggggctctacttccacatcggcgagaccgagaagcgctgtttcatcgaggaaatccccgacgagaccatggtcatcggcaactatcgtacccagatgtgggataagcagaaggaggtcttcctgccctcgacccctggcctgggcatgcacgtggaagtgaaggaccccgacggcaaggtggtgctgtcccggcagtacggctcggagggccgcttcacgttcacctcccacacgcccggtgaccatcaaatctgtctgcactccaattctaccaggatggctctcttcgctggtggcaaactgcgkgtgcatctcgacatccaggttggggagcatgccaacaactaccctgagattgctgcaaaagataagctgacggagctacagctccgcgcccgccagttgcttgatcaggtggaacagattcagaaggagcaggattaccaaaggtatcgtgaagagcgcttccgactgacgagcgagagcaccaaccagagggtcctatggtggtccattgctcagactgtcatcctcatcctcactggcatctggcagatgcgtcacctcaagagcttctttgaggccaagaagctggtgtagtgccctctttgtatgacccttcctttttacctcatttatttggtactttccccacacagtcctttatccacctggatttttagggaaaaaaatgaaaaagaataagtcacattggttccatggccacaaaccattcagatcagccacttgctgaccctggttcttaaggacacatgacattagtccaatctttcaaaatcttgtcttagggcttgtgaggaatcagaactaacccaggactcagtcctgcttcttttgcctcsagtgattttcctctgtttttcnctwaatwagcaaawkaaaactctctccattacctctgctttctctttgttcccttaccccttaagttaattgcattttcccaaaacaggcctgccncctttctgctggtcattctggcttcccttatnggtttgt

SEQ ID NO: 149 - DNA, 1691 bp, Homo sapiens
aggcgcttaggggctgaggcgcgatggcaggtgtcggggctgggcctctgcgggcgatggggcggcaggccctgctgcttctcgcgctgtgcgccacaggcgcccaggggctctacttccacatcggcgagaccgagaagcgctgtttcatcgaggaaatccccgacgagaccatggtcatcggtcaggcgggctgagggtggggaggccctttgtacccagctcagccctcggcggcgctccctcctcccgagcccagccgggtcgctggctcccccagtacctagcctgagggtgccccgaggacgccaggccccctgcctagagctccgggccgcacgtcggagggggccgggcggagaggcggcccactagggccggtcgtgactatgtgtctgccccgcaggcaactatcgtacccagatgtgggataagcagaaggaggtcttcctgccctcgacccctggcctgggcatgcacgtggaagtgaaggaccccgacggcaaggtggtgctgtcccggcagtacggctcggagggccgcttcacgttcacctcccacacgcccggtgaccatcaaatctgtctgcactccaattctaccaggatggctctcttcgctggtggcaaactgcgtgtgcatctcgacatccaggttggggagcatgccaacaactaccctgagattgctgcaaaagataagctgacggagctacagctccgcgcccgccagttgcttgatcaggtggaacagattcagaaggagcaggattaccaaagggcaagtgcatatctccttgtaatttgagagggcagttgacctttatacccactatacctactcaagtttctgcttgggagatcagctctgcagagaatggaatgagaagtattggtttagataggttgtttgtttgttgtttttgagacggagtttcactcttgttgcccatgctggagtgcaatgccatgatcttggctcactgcaacctccgcctccccaggctgaggcaggagaatggcgtgagctcgggaggtggagcttgcagtgagctgagatcgtgccactgcactccagcctgggcgacagagtgagactccttctaaaaaacaaaaacaaaaccaaaacagtagttagggtacacacacacaaattctagtgattttccccccagtactacccttgacttttgaaattcctgctttctcagagtttacaacatccttaccaaacagccttctccctccttaccacaaaaaaagaaaaaaaagttctggggttgaggggacactccattcttaacatcctctattatcccagcccaattccccagctctcactgggactagttgtacctatcttcatcatttggtcccagcatgactacctgttggtgcatgagctgatctctcctaacctaacagccagatgctagtctctggtactyagatgctgggctgcatcagataggatgcacaggatcatcctggaagcttgttgacatagattcctgtgcaacactcagatatagtcttaatgtagatttgtgttgggtggtatggtaggtagaataatggcctaccactctgaaacatatgratatgttacctaacatgacagaagagaattaagttgctaatcagatgactgtaaaataaattatcctggatcatcaaaaaaaaaaaaaaaaa

SEQ ID NO: 150 - DNA, 1719 bp, Homo sapiens
  misc_feature (102)..(102): n equals a,t,g, or c
tattaagtgctttcataatgttgtgctaccaacaccatcatccagctccagaactttttcatcttctcaaactaaaaatctgtacttattttgttttgtttntgagatggagtctcgctctgttgcccaggctggagcgcagtggcgccatctcggctcactgcaccctccgcctctcaggttcaagcgattctcctgcctcagcctcccaagtagctgggattacaggcaagtgccaccatgcgtggctcatttttgtgtttttagtagagactgggtttcaccatgttggccaggctggtcttgaactcctggcctcaggcaatccactgccgcagcctcccaaagtgttgggattacaggcgtgagcactgcacccagcaaatctgtacttattataaacaataacttcccgtttccttttgtcctgacacccaccattctactttctgtctctatgatcctgactaccctatctcatataagtggaatcattcagtatttgtccttttgtgactggcttatttcactgagtataatgttctcacagttcatccatgttatagcatgtgtcagaatttcttaaggctaatattccattgtatgcatgtgccacatttcgctttcagtagtcatttttaagctctataaaataaaatgaagaaaggacagttcacaatctagtaatagccattgcctacctgtttttcttggactcttgttggaaatggtaggatcatgatttcagtcctaacagagatgcttgtggagggacagcctgtccctttcttggggcagcctcagtggggagaccatagcactcctaatggagtcacagatagtattccaaaagagtttggtcctggagttgagtarttacacgcagggagggacctcacaacagccagactgtttctcctgctcacttaaccctgtgttgccccacamagtatcgtgaagagcgcttccgactgacgagcgagagcaccaaccagagggtcctatggtggtccattgctcagactgtcatcctcatcctcactggcatctggcagatgcgtcacctcaagagcttctttgaggccaagaagctggtgtagtgccctctttgtatgacccttcctttttacctcatttatttggtactttccccacacagtcctttatccacctggatttttagggaaaaaaatgaaaaagaataagtcacattggttccatggccacaaaccattcagatcagccacttgctgaccctggttcttaaggacacatgacattagtccaatctttcaaaatcttgtcttagggcttgtgaggaatcagaactaacccaggactcagtcctgcttcttttgcctcgagtgattttcctctgtttttcactaaataagcaaatgaaaactctctccattaccttctgctttctctttgtccacttacgcagtaggtgactggcatgtgccacagagcaggccctgcctcactgtctgctggtcagttctgggttcacttaatggctttgtgaatgtaaataaggggcaggtcttggccctagaggattgagatgtttttctatatcttagaactatttttggataaattatatattttccttcctagtagaagtgttactgcctgtaactagctcaaaataccaatgcagtttctgcattctgggwtttgtttwtcttttatattttttttttttgagttttg

SEQ ID NO: 151 - DNA, 722 bp, Homo sapiens
  misc_feature (49)..(49): n equals a,t,g, or c
aaatagtcaaagagagtgggagagcgaatgagtcagggaaacgcagtgngacttttgggtggcactgagacacctgggctgagacatacaggacagagcatggctcgcctacagactgcactcctggttgtcctcgtcctccttgctgtggcgcttcaagcaactgaggcaggcccctacggcgccaacatggaagacagcgtctgctgccgtgattacgtccgttaccgtctgcccctgcgcgtggtgaaacacttctactggacctcagactcctgcccgaggcctggcgtggtgttgctaaccttcagggataaggagatctgtgccgatcccagagtgccctgggtgaagatgattctcaataagctgagccaatgaagagcctactctgatgaccgtggccttggctcctccaggaaggctcaggagccctacctccctgccattatagctgctccccgccagaagcctgtgccaactctctgcattccctgatctccatccctgtggctgtcacccttggtcacctccgtgctgtcactgccatctcccccctgacccctctaacccatcctytgcctccctccctgcagtcagagggtcctgttcccatcagcgattcccctgcttaaacccttccatgactcccccctgccctaagctgaggtcagtctcccaagcctggcatgtggccctctggatctgggttccatccctgt

SEQ ID NO: 152 - DNA, 1281 bp, Homo sapiens
cccacgcgtccgcccacgcgtccgcccacgcgtccgtgggctgagacatacaggacagagcatggctcgcctacagactgcactcctggttgtcctcgtcctccttgctgtggcgcttcaagcaactgaggcaggcccctacggcgccaacatggaagacagcgtctgctgccgtgattacgtccgttaccgtctgcccctgcgcgtggtgaaacacttctactggacctcagactcctgcccgaggcctggcgtggtgttgctaaccttcagggataaggagatctgtgccgatcccagagtgccctgggtgaagatgattctcaataagctgagccaatgaagagcctactctgatgaccgtggccttggctcctccaggaaggctcaggagccctacctccctgccattatagctgctccccgccagaagcctgtgccaactctctgcattccctgatctccatccctgtggctgtcacccttggtcacctccgtgctgtcactgccatctcccccctgacccctctaacccatcctctgcctccctccctgcagtcagagggtcctgttcccatcagcgattcccctgcttaaacccttccatgactccccactgccctaagctgaggtcagtctcccaagcctggcatgtggccctctggatctgggttccatctctgtctccagcctgcccacttcccttcatgaatgttgggttctagctccctgttctccaaacccatactacacatcccacttctgggtctttgcctgggatgttgctgacactcagaaagtcccaccacctgcacatgtgtagccccaccagccctccaaggcattgctcgcccaagcagctggtaattccatttcatgtattagatgtcccctggccctctgtcccctcttaataaccctagtcacagtctccgcagattcttgggatttgggggttttctcccccacctctccactagttggaccaaggtttctagctaagttactctagtctccaagcctctagcatagagcactgcagacaggccctggctcagaatcagagcccagaaagtggctgcagacaaaatcaataaaactaatgtccctcccctctccctgccaaaaggcagttacatatcaatacagagactcaaggtcactagaaatgggccagctgggtcaatgtgaagccccaaatttgcccagattcacctttcttcccccactccctttttttttttttttttgagawggagttygctcttggacccacctgga

SEQ ID NO: 153 - DNA, 356 bp, Homo sapiens
  misc_feature (15)..(15): n equals a,t,g, or c
  misc_feature (353)..(353): n equals a,t,g, or c
atggttgagctgagntccacaccatgtacyccrgcctggatgacagagtggagactctgtttcaaaaaaacagaaaagaaaatatagtttgattcttcatttttttaaatttgcaaatctcaggataaagtttgctaagtaaattagtaatgtactatagatataactgtacaaaaattgttcaacctaaaacaatctgtaattgcttattgttttattgtatactctttgtctttttaagacccctaatagccttttgtaacttgatggcttaaaaatacttaataaatctgccatttcaaatttcaaaaaaaaaaaaaaaaaaaaaaaaaaaaaaaaaaaaaaaaaaaaanaaa

SEQ ID NO: 154 - DNA, 624 bp, Homo sapiens
tctccatggatccatttgtagtcttggtgctttgtctgtcctttctgcttctcctgtcactgtggagacagagatctgcaagagggaacctccctcctggacccactcctctcccaattattggcaattaccacctgatagatatgaaggacattggccagtgccttactaatttttctaaaatatatggccctgtgttcactctgtattttggctcacagcctattgtgatattacatggttatgaggcaatgaaagaagccttcattgactatggagaagagttctctggaagaggaaggattccggtttttgacaaagtttctaaaggaaagggcattggttttagccatggaaatgtatggaaagccacaagggtcttcacagtcaataccttgaggaacttgggcatgggaaaaaggaccattgagaccaaagtgcaagaggaagcacagtggctcatgaaggaactgaagaaaacaaatggctcaccctgtgatccccaattcatcataggatgtgctccctgcaatgtcatctgctccattgttttccagaatcgttttgattataaggataaggattttcttagcttgataggaaaagtgaatgaatgcactgaaa

SEQ ID NO: 155 - DNA, 447 bp, Homo sapiens
ctgcaggaattcggcacgagatcagagtacataatcgtaagtgtatactactatcctagggccatcagggaatgatctagtctacatattagttgtatttcaggccaattactttagattttcatgtgataaaattccaaattaacttatatttttctcttaatggttttttttttgttgttgctgtttttgagagagggtcttgctctgtcgcccaggctggagtgcagcagcacaatcattgctcactacagcctcaaattcctggactcaagtgctcctcccatctcagcctccccagtagctgggactacagcatgcaccacgatacctggttatcttttttatttttttgtagagatgaggtctccctgtgttgcccaggctggtctcaaacacctggactcaagggatcctcctgcctcagcaaaaaaaaaaaaaaaaaaa

SEQ ID NO: 156 - DNA, 1050 bp, Homo sapiens
  misc_feature (762)..(762): n equals a,t,g, or c
  misc_feature (767)..(767): n equals a,t,g, or c
  misc_feature (902)..(902): n equals a,t,g, or c
  misc_feature (936)..(936): n equals a,t,g, or c
  misc_feature (959)..(959): n equals a,t,g, or c
  misc_feature (1012)..(1012): n equals a,t,g, or c
cccccttcctctgggtgtccttgtctcctgctatcagggcacagtcctcaggatgtttcggggagaataggagccagaacctgagcccctaagccattcccctcaccaatgatggggtccccagtgagtcatctgctggccggcttctgtgtgtgggtcgtcttgggctgggtagggggctcagtccccaacctgggccctgctgagcaggagcagaaccattacctggcccagctgtttggcctgtacggcgagaatgggacgctgactgcagggggcttggcgcggcttctccacagcctggggctaggccgagttcaggggcttcgcctgggacagcatgggcctctgactggacgggctgcatccccagctgcagacaattccacacacaggccacagaaccctgagctgagtgtggatgtctgggcagggatgcctctgggtccctcagggtggggtgacctggaagagtcaaaggcccctcacctaccccgtgggccagccccctcgggcctggacctccttcacaggcttctgttgctggaccactcattggctgaccacctgaatgaggattgtctgaacggctcccagctgctggtcaattttggcttgagccccgctgctcctctgacccctcgtcagtttgctctgctgtgcccagccctgctttatcagatcgacagccgcgtctgcatcggcgctccggcccctgcacccccaggggatctactatctgscctgcttcaragtgccctngcagncctgttgctcagcctcccttctcccctatccctgctgctgctgcggctcctgggacctcgtctactacggcccttgctgggcttcctgggggccctggcggtgggcactctttgtggacatgctaccaagcctgnttcggcctccggagcccctggctacgccccatgngcttctgcaagggctggggctgntgcttggggggccgggcttaagcttggcataaaccttggttggaagaaccggntactggcccgggaacaactgaaggcttgatggggccaa

SEQ ID NO: 157 - DNA, 678 bp, Homo sapiens
ctgctgctgagcctcgtgtctggagccctgggattggggggtgcagtcctgggggtggggctcagcctgggccctgtccccctcactccctgggtgtttggggtcactgctggggtcttcctctatgtggcccttgtggacatggtgagagatgtcgggtagagcagagaaatcaagggcagtgggtaggcgggagtgaagagggaggtagcagtccctccgcctctaccattagctcctggaagggcgtcagaccataggcccgcaaaagtctgagaaacaagggactaaggtgtttgggtgggggctgctgatgctttctgacaccattcctctggagttgagaggtcaggggcaaggccagaatcctgacatcctctttttctttcagctaccagccctgcttcgtcctccggagcccctgcctacgccccatgtgctcctgcaggggctggggctgctgctggggggcggcctcatgcttgccataaccctgctggaggagcggctactgcccgtgaccactgagggctgatggggccagtggaaaggggtcgggttgcccttccttccccccaaccacaggaatggaggcgggacacagggccagtaggagcaataggattttaataaacagaacccatcccaaaaaaaaaaaaaaaaaaaaaaagaaaaaag

SEQ ID NO: 158 - DNA, 959 bp, Homo sapiens
tcgacccacgcgtccgcggacgcgtgggcggacgcgtgggccggagtggagggagaggcccgggtcccgcgctcccctgggcgccccacggcagcctcagagccccgcggggagcgcgcagccctcggggcgggcgccgggatgtgtgacgggagccacttggcctccaccctccgctattgcatgacagtcagcggcacagtggttctggtggccgggacgctctgcttcgcttggtggagcgaaggggatgcaaccgcccagcctggccagctggccccacccacggagtatccggtgcctgagggccccagccccctgctcaggtccgtcagcttcgtctgctgcggtgcaggtggcctgctgctgctcattggcctgctgtggtccgtcaaggccagcatcccagggccacctcgatgggacccctatcacctctccagagacctgtactacctcactgtggagtcctcagagaaggagagctgcaggacccccaaagtggttgacatccccacttacgaggaagccgtgagcttcccagtggccgaggggcccccaacaccacctgcataccctacggaggaagccctggagccaagtggatcgagggatgccctgctcagcacccagcccgcctggcctccacccagctatgagagcatcagccttgctcttgatgccgtttctgcagagacgacaccgagtgccacacgctcctgctcaggcctggttcagactgcacggggaggaagttaaaggctcctagcaggtcctgaatccagagacaaaaatgctgtgccttctccagagtcttatgcagtgcctgggacacagtaggcactcagcaaacgttcgttgttgaaggctgttctatttatctattgctgtataacaaaccaccccagaatttagtggcttaaaataaatcccattttattaaaaagaaaaaaagaaaa

SEQ ID NO: 159 - DNA, 681 bp, Homo sapiens
tcgacccacgcgtccgcccacgcgtccggggggctgctttgcatctgaaactgtcagccccagaatgttgacagtcgctctcctagcccttctctgtgcctcagcctctggcaatgccattcaggccaggtcttcctcctatagtggagagtatggaagtggtggtggaaagcgattctctcattctggcaaccagttggacggccccatcaccgccctccgggtccgagtcaacacatactacatcgtaggtcttcaggtgcgctatggcaaggtgtggagcgactatgtgggtggtcgcaacggagacctggaggagatctttctgcaccctggggaatcagtgatccaggtttctgggaagtacaagtggtacctgaagaagctggtatttgtgacagacaagggccgctatctgtcttttgggaaagacagtggcacaagtttcaatgccgtccccttgcaccccaacaccgtgctccgcttcatcagtggccggtctggttctctcatcgatgccattggcctgcactgggatgtttaccccactagctgcagcagatgctgagcctcctctccttggcaggggcactgtgatgatgagtaagaactcccttatcactaacccccatccaaatggctcaataaaaaaatatggttaaggctaaaaaaaaaaaaaaa

SEQ ID NO: 160 - DNA, 720 bp, Homo sapiens
tcgacccacgcgtccgctattttaaagggttgttgtgaggcctagaacagtgcttggactcctgtaagcactttatataatgggggctgctgtgatgtgtaatggtcatgatgggagtgaggatgatgttgaaggtgatgaagataccacttctgttaacagaggcattgcctgcctttactgttgcctgttggaaagttgcttcaggggcatatacaatagcagtttcagggagtggtgtgacctgtagcaggaaggggaaagtcaggagaaaagaattttcttctctgcaagagactggggtaggtaccagctatttgacagggaggcactattcttggatgtccatctgcacactagattcatgagtgttggggattacctgggcatcccaaaccatattacagtgaattatgttattgttatttatttaacatgtacatatattttcaaaatatatagaaaatgtcagaatcggaaaaaaaatcatagggacttaggcagttattggagcttgctttaaaaacccatatcagtgttgaccagtatctgggtttcaagagaattgtcaggaaaagcagtcttaggtcaggagtggtggctcacacccataatcccagcactctgggaggccagggtgggtggattgattgagctcaggagtttgagaccagcctaagcaacatggtgaaaacccatctctacaaaaaaaaaaaaaaa

SEQ ID NO: 161 - DNA, 878 bp, Homo sapiens
  misc_feature (875)..(875): n equals a,t,g, or c
ttgtcccagctggtctcgaacccctgggctcaagcaatccacccatcgtggcctcctgcagtgctggggttataggcatgagccaccttggcctgcataattcttttttttttttttttttgagatggagtttcgctcttgtcgctcaggctggagtgcaatggtgcgatctcggctcaccgcaacctccacctcctggattcaagcaattctcctgcctcagcctcccaagtagctgggattacaggtgtgcaccaccatgcctagctaattttgtatttttagtagagacggggtttctccatgttggtcaggctggtctcgaactcctgacctcaagtgatctgtccacctcggcctcccagagtgctgggattacaggcgtgagccactgttcccagcaggaatttcttttttatagtattggataaagtttggtgtttttacagaggagaagcaatgggtcttagctctttctctattatgttatcatcctcccttttttgtacaatatgttgtttacctgaaaggaaggtttctattcgttggttgtggacctggacaaagtccaagtctgtggaacttaaaaccttgaaggtctgtcataggactctggacaatctcacaccttagctattcccagggaaccccagggggcaactgacattgctccaagatgttctcctgatgtagcttgagatataaaggaaaggccctgcacaggtggctgtttcttgtctgttatgtcagaggaacagtcctgttcagaaaggggctcttctgagcagaaatggctaataaactttgtgctgatctggaaaaaaaaaaaaaaaaaaaaaaaaaaaaaaaaaaaaaaaaaaaaaaaaaaaaaaaanggg

SEQ ID NO: 162 - DNA, 843 bp, Homo sapiens
ttgtcccagctggtctcgaacccctgggctcaagcaatccacccatcgtggcctcctgcagtgctggggttataggcatgagccaccttggcctgcataattcttttttttttttttttttgagatggagtttcgctcttgtcgctcaggctggagtgcaatggtgcgatctcggctcaccgcaacctccacctcctggattcaagcaattctcctgcctcagcctcccaagtagctgggattacaggtgtgcaccaccatgcctagctaattttgtatttttagtagagacggggtttctccatgttggtcaggctggtctcgaactcctgacctcaagtgatctgtccacctcggcctcccagagtgctgggattacaggcgtgagccactgttcccagcaggaatttcttttttatagtattggataaagtttggtgtttttacagaggagaagcaatgggtcttagctctttctctattatgttatcatcctcccttttttgtacaatatgttgtttacctgaaaggaaggtttctattcgttggttgtggacctggacaaagtccaagtctgtggaacttaaaaccttgaaggtctgtcataggactctggacaatctcacaccttagctattcccagggaaccccagggggcaactgacattgctccaagatgttctcctgatgtagcttgagatataaaggaaaggccctgcacaggtggctgtttcttgtctgttatgtcagaggaacagtcctgttcagaaaggggctcttctgagcagaaatggctaataaactttgtgctgatctggaaaaaaaaaaaaaaaaaaaaaaaaa

SEQ ID NO: 163 - DNA, 609 bp, Homo sapiens
  misc_feature (591)..(591): n equals a,t,g, or c
gacacttccctctgtgaccatgaaactctgggtgtctgcattgctgatggcctggtttggtgtcctgagctgtgtgcaggccgaattcttcacctctattgggcacatgactgacctgatttatgcagagaaagagctggtgcagtctctgaaagagtacatccttgtggaggaagccaagctttccaagattaagagctgggccaacamaatggaagccttgactascaagtcagctgctgatgctgagggctacctggctcaccctgtgaatgcctacaaactggtgaagcggctaaacacagactggcctgcgctggaggaccttgtcctgcaggactcagctgcaggttttatcgccaacctctctgtgcagcggcagttcttccccactgatgaggacgagataggagctgccaaagccctgatgagacttcaggacacatacaggctggacccaggcacaatttccagaggggaacttccaggaaccaagtaccaggcaatgctgagtgtggatgactgctttgggatgggccgctcggcctacaatgaaggggactattatcatacggtgttgtggatggagcnagtgctaaagcagcttga

SEQ ID NO: 164 - DNA, 1461 bp, Homo sapiens
  misc_feature (1401)..(1401): n equals a,t,g, or c
  misc_feature (1432)..(1432): n equals a,t,g, or c
ggaggaggcgccgagctgaccgggcgacgccgcgggaggttctggaaacgccsggagctgcgagtgtccagacacttccctctgtgaccatgaaactctgggtgtctgcattgctgatggcctggtttggtgtcctgagctgtgtgcaggccgaattcttcacctctattgggcacatgactgacctgatttatgcagagaaagagctggtgcagtctctgaaagagtacatccttgtggaggaagccaagctttccaagattaagagctgggccaacaaaatggaagccttgactagcaagtcagctgctgatgctgagggctacctggctcaccctgtgaatgcctacaaactggtgaagcggctaaacacagactggcctgcgctggaggaccttgtcctgcaggactcagctgcaggttttatcgccaacctctctgtgcagcggcagttcttccccactgatgaggacgagataggagctgccaaagccctgatgagacttcaggacacatacaggctggacccaggcacaatttccagaggggaacttccaggaaccaagtaccaggcaatgctgagtgtggatgactgctttgggatgggccgctcggcctacaatgaaggggactattatcatacggtgttgtggatggagcaggtgctaaagcagcttgatgccggggaggaggccaccacaaccaagtcacaggtgctggactacctcagctatgctgtcttccagttgggtgatctgcaccgtgccctggagctcacccgccgcctgctctcccttgacccaagccacgaacgagctggagggaatctgcggtactttgagcagttattggaggaagagagagaaaaaacgttaacaaatcagacagaagctgagctagcaaccccagaaggcatctatgagaggcctgtggactacctgcctgagagggatgtttacgagagcctctgtcgtggggagggtgtcaaactgacaccccgtagacagaagaggcttttctgtaggtaccaccatggcaacagggccccacagctgctcattgcccccttcaaagaggaggacgagtgggacagcccgcacatcgtcaggtactacgatgtcatgtctgatgaggaaatcgagaggatcaaggagatcgcaaaacctaaacttgcacgagccaccgttcgtgatcccaagacaggagtcctcactgtcgccagctaccgggtttccaaaagctcctggctagaggaagatgatgaccctgttgtggcccgagtaaatcgtcggatgcagcatatcacagggttaacagtaaagactgcagaattgttacaggttgcaaattatggagtgggaggacagtatgaaccgyacttcgacttctctaggaatgatnagcgagatactttcaagcatttagggacggngaatcgtgtggctactttcttaaactaca

SEQ ID NO: 165 - DNA, 829 bp, Homo sapiens
atgcagcatacacagggttacaagtaagacgcagattgttacaggttgcaaattatgragtgggaggacagtatgaaccgcacttcgacttctctaggaatgatgagcraatactttcaagcatttagggacgggraatcgtgtggctactttcttaaactacatgagtgatgtagaagctggtggtgccaccgtcttccctgatctgggggctgcaatttggcctaagaagggtacagctgtgttctggtacaacctcttgcggagcggggaaggtgactaccgaacaagacatgctgcctgccctgtgcttgtgggctgcaagtgggtctccaataagtggttccatgaacgaggacaggagttcttgagaccttgtggatcaacagaagttgactgacatccttttctgtccttccccttcctggtccttcagcccatgtcaacgtgacagacacctttgtatgttcctttgtatgttcctatcaggctgatttttggagaaatgaatgtttgtctggagcagagggagaccatactagggcgactcctgtgtgactgaagtcccagcccttccattcagcctgtgccatccctggccccaaggctaggatcaaagtggctgcagcagagttagctgtctagcgcctagcaaggtgcctttgtacctcaggtgttttaggtgtgagatgtttcagtgaaccaaagttctgataccttgtttacatgtttgtttttatggcatttctatctattgtggctttaccaaaaaataaaatgtccctaccagaagccttaaaaaaaaaaaaaaaaaaaaaaaagggcggcc

SEQ ID NO: 166 - DNA, 635 bp, Homo sapiens
acaccgtgtcctcttgcctgggagaggggaagcagatctgaggacatctctgtgccaggccagaaaccgcccacctgcagttccttctccgggatggacgtggggcccagctccctgccccaccttgggctgaagctgctgctgctcctgctgctgctgcccctcaggggccaagccaacacaggctgctacgggatcccagggatgcccggcctgcctggggcaccagggaaggatgggtacgacggactgccggggcccaagggggagccaggaatcccagccattcccgggatccgaggacccaaagggcagaagggagaacccggcttacccggccatcctgggaaaaatggccccatgggaccccctgggatgccaggggtgcccggccccatgggcatccctggagagccaggtgaggagggcagatacaagcagaaattccagtcagtgttcacggtcactcggcagacccaccagscccctgcacccaacagcctgatcagattcaacgcggkcctcaccaacccgcagggagattatgacacgagcactggcaagttcacctgcaaagtccccggcctctactactttgtctaccacgcgtcgcatacagccaacctgtgcgtgct

SEQ ID NO: 167 - DNA, 1195 bp, Homo sapiens
  misc_feature (1166)..(1166): n equals a,t,g, or c
  misc_feature (1173)..(1173): n equals a,t,g, or c
  misc_feature (1191)..(1191): n equals a,t,g, or c
  misc_feature (1193)..(1193): n equals a,t,g, or c
ggtcgacccacgcgtccgcactcagacaccgtgtcctcttgcctgggagaggggaagcagatctgaggacatctctgtgccaggccagaaaccgcccacctgcagttccttctccgggatggacgtggggcccagctccctgccccaccttgggctgaagctgctgctgctcctgctgctgctgcccctcaggggccaagccaacacaggctgctacgggatcccagggatgcccggcctgccyggggcaccagggaaggatgggtacgacggactgccggggcccaagggggagccaggaatcccagccattcccgggatccgaggacccaaagggcagatacaagcagaaattccagtcagtgttcacggtcactcggcagacccaccagccccctgcacccaacagcctgatcagattcaacgcggtcctcaccaacccgcagggagattatgacacgagcactggcaagttcacctgcaaagtccccggcctctactactttgtctaccacgcgtcgcatacagccaacctgtgcgtgctgctgtaccgcagcggcgtcaaagtggtcaccttctgtggccacacgtccaaaaccaatcaggtcaactcgggcggtgtgctgctgaggttgcaggtgggcgaggaggtgtggctggctgtcaatgactactacgacatggtgggcatccagggctctgacagcgtcttctccggcttcctgctcttccccgactagggcgggcagatgcgctcgagccccacgggccttccacctccctcagcttcctgcatggacccaccttactggccagtctgcatccttgcctagaccattctccccaccagatggacttctcctccagggagcccaccctgacccacccccactgcaccccctccccatgggttctctccttcctctgaacttctttaggagtcactgcttgtgtggttcctgggacacttaaccaatgccttctggtactgccattcttttttttttttttttcaagtattggaaggggtggggagatatataaataaatcatgaaatcaatacawaaaaaaaaaaaaaaaaaaaaaaaaaaaaaaaaaaaaaaaaaaaaaaaaaaaaaaaaaaaaaaaaaaaaaaaaaaaaaaaaaaaaaaggggsggccgtttnaaagganccaagtttacgaacccgngnat

SEQ ID NO: 168 - DNA, 1055 bp, Homo sapiens
  misc_feature (1009)..(1009): n equals a,t,g, or c
ggtcgacccacgcgtccgcactcagacaccgtgtcctcttgcctgggagaggggaagcagatctgaggacatctctgtgccaggccagaaaccgcccacctgcagttccttctccgggatggacgtggggcccagctccctgccccaccttgggctgaagctgctgctgctcctgctgctgctgcccctcaggggccaagccaacacaggctgctacgggatcccagggatgcccggcctgcccggggcaccagggaaggatgggtacgacggactgccggggcccaagggggagccaggaatcccagccattcccgggatccgaggacccaaagggcagaagggagaacccggcttacccggccatcctgggaaaaatggccccatgggaccccctgggatgccaggggtgcccggccccatgggcatccctggagagccaggtgaggagggcagatacaagcagaaattccagtcagtgttcacggtcactcggcagacccaccagccccctgcacccaacagcctgatcagattcaacgcggtcctcaccaacccgcagggagattatgacacgagcactggcaagttcacctgcaaagtccccggcctctactactttgtctaccacgcgtcgcatacagccaacctgtgcgtgctgctgtaccgcagcggcgtcaaagtggtcaccttctgtggccacacgtccaaaaccaatcaggtcaactcgggcggtgtgctgctgaggttgcaggtgggcgaggaggtgtggctggctgtcaatgactactacgacatggtgggcatccagggctctgacagcgtcttctccggcttcctgctcttccccgactagggcgggcagatgcgctcgagccccacgggccttccacctccctcagcttcctgcatggacccaccttactggccagtctgcatccttgcctagaccattctccccaccagatggacttctcctccagggagsccaccctgaccaccccactgnaccccttcccatgggtctctcttctctaacttcttaggagtcactg

SEQ ID NO: 169 - DNA, 1188 bp, Homo sapiens
  misc_feature (1099)..(1099): n equals a,t,g, or c
ccggaattcccggtcgacccacgcgtccggaagcagatctgaggacatctctgtgccaggccagaaaccgcccacctgcaggtgaggcccggacccctgcccagttccttctccgggatggacgtggggcccagctccctgccccaccttgggctgaagctgctgctgctcctgctgctgctgcccctcaggggccaagccaacacaggctgctacgggatcccagggatgcccggcctgcccggggcaccagggaaggatgggtacgacggactgccggggcccaagggggagccaggaatcccagccattcccgggatccgaggacccaaagggcagaagggagaacccggcttacccggccatcctgggaaaaatggccccatgggaccccctgggatgccaggggtgcccggccccatgggcatccctggagagccaggtgaggagggcagatacaagcagaaattccagtcagtgttcacggtcactcggcagacccaccagccccctgcacccaacagcctgatcagattcaacgcggtcctcaccaacccgcagggagattatgacacgagcactggcaagttcacctgcaaagtccccggcctctactactttgtctaccacgcgtcgcatacagccaacctgtgcgtgctgctgtaccgcagcggcgtcaaagtggtcaccttctgtggccacacgtccaaaaccaatcaggtcaactcgggcggtgtgctgctgaggttgcaggtgggcgaggaggtgtggctggctgtcaatgactactacgacatggtgggcatccagggctctgacagcgtcttctccggcttcctgctcttccccgactagggcgggcagatgcgctcgagacccacgggccttccacctccctcagcttcctgcatggacccaccttactggccagtctgcatccttgcctagaccattctcccctccagggagcccaccctgacccacccccactgcaccccctccccatgggttctctccttcctctgaacttctttaggagtcactgcttgtgtggttcctgggacacttaaccaatgccttctggtactgccattctttnttttttttttcaagtattggaaggggtggggagatatataaataaatcatgaaatcaatamaaaaaaaaaaaaaaaaaaaaaaaaaaaa

SEQ ID NO: 170 - DNA, 425 bp, Homo sapiens
gcgagcgccgcacatgcgccggggtcgggccgggccgggccgggccgggggcgcgcgctctgcgagctggatgtccaggctgcgggcgctgctgggcctcgggctgctggttgcgggctcgcgcctgccgcggatcaaaagccagaccatcgcctgtcgctcgggacccacctggtggggaccgcagcggctgaactcgggtggccgctgggactcagaggtcatggcgagcacggtggtgaagtacctgagccaggaggaggcccaggccgtggaccaggagctatttaacgaataccagttcagcgtggaccaacttatggaactggccgggctgagctgtgctacagccatcgccaaggcatatccccccacgtccatgtccaggagcccccctactgtcctggtcatctgtggcccgggga

SEQ ID NO: 171 - DNA, 1187 bp, Homo sapiens
gcgagcgccgcacatgcgccggggtcgggccgggccgggccgggccgggggcgcgcgctctgcgagctggatgtccaggctgcgggcgctgctgggcctcgggctgctggttgcgggctcgcgcctgccgcggatcaaaagccagaccatcgcctgtcgctcgggacccacctggtggggaccgcagcggctgaactcgggtggccgctgggactcagaggtcatggcgagcacggtggtgaagtacctgagccaggaggaggcccaggccgtggaccaggagctatttaacgaataccagttcagcgtggaccaacttatggaactggccgggctgagctgtgctacagccatcgccaaggcatatccccccacgtccatgtccaggagcccccctactgtcctggtcatctgtggcccggggaataatggaggagatggtctggtctgtgctcgacacctcaaactctttggctacgagccaaccatctattaccccaaaaggcctaacaagcccctcttcactgcattggtgacccagtgtcagaaaatggacatccctttccttggggaaatgcccgcagagcccatgacgattgatgaactgtatgagctggtggtggatgccatctttggcttcagcttcaagggcgatgttcgggaaccgttccacagcatcctgagtgtcctgaagggactcactgtgcccattgccagcatcgacattccctcaggatgggacgtggagaagggaaatgctggagggatccagccagacttgctcatctccctcacagcccccaaaaaatctgcaacccagtttaccggtcgctaccattacctggggggtcgttttgtgccacctgctctggaaaagaagtaccagctgaacctgccaccctaccctgacactgagtgtgtctatcgtctgcagtgagggaaggtgggtgggtattctccccaataaagacttagagcccctctcttccagaactgtggattcctgggagctcctctggcaataaaagtcagtgaatggtggaagtcagagagcaaccctggggattgggtgccatctctctaggggtaacacaaagggcaagaggttgctatggtatttggaaacaatgaaaatggactgttagatgccaaaaaaaaaaaaaaaaaaaaaaaaaaaaaaaactcga

SEQ ID NO: 172 - DNA, 562 bp, Homo sapiens
aatacttgtttctttagcactttgaagatagaagagccactttataagtactaagtcatcatttgccttgaaagtttcctctgcattgggtttgaagtagtttagttakgtctttttctctgtatgtaagtagtataatttgttactttcaaatacccgtactttgaatgtaggtttttttgttgttgttatctataaaaattgagggaaatggttatgcaaaaaaatattttgctttggaccatatttcttaagcataaaaaaaatgctcagttttgcttgcattccttgagaatgtatttatctgaagatcaaaacaaacaatccagatgtataagtactaggcagaagccaattttaaaatttccttgaataatccatgaaaggaataattcwaatccagataarcagagttggcagtmtattatagtgataattttgtattttcacaaaaaaaaagttaaactcttcttttctttttattataatgaccagcttttggtatttcmttgttaccaagttctatttttagaataaaattgttctccttctaaaaaaaaaa

SEQ ID NO: 173 - DNA, 822 bp, Homo sapiens
gaattcggcacgagccagctccttcctgttcccctggcggcccctcgcttcttccttctggatgggggcccagggggcaggagagtataaaggcgatgtggagggtgcccggcacaaccagacgcccagtcacaggcgagagcctgggatgcaccggccagaggcatgctgctgctgctcacgcttgccctcctggggggccccacctgggcagggaagatgtatggccctggaggaggcaagtatttcagcaccactgaagactacgaccatgaaatcacagggctgcgggtgtctgtaggtcttctsctggtgaaaagtgtccaggtgaaattggagactcctgggacgtgaaatgggagccttaggtgggaatacccaggaagtcaccctgcagccaggcgaatacatcacaaaagtctttgtcgccttccaagctttcctccggggtgtggtcatgtacaccagcaaggaccgctatttctattttgggaagcttgatggccagatctcctctgcctaccccagccaagaggggcaggtgctggtgggcatctatggccagtatcaactccttggcatcaagagcattggctttgaatggaattatccactagaggagccgaccactgagccaccagttaatctcacatactcagcaaactcacccgtgggtcgctagggtggggtatggggccatccgagctgaggccatctgggtggtggtggctgatggtactggagtaactgagtcgggacgctgaatctgaatccaccaataaataaagcttctgcagaaaaaaaaaaaaaaaaaaaaaaaaa

SEQ ID NO: 174 - DNA, 398 bp, Homo sapiens
cgggtcgacccacgcgtccatgaagatcccggtccttcctgccgtggtgctcctctccctcctggtgctccactctgcccagggagccaccctgggtggtcctgaggaagaaagcaccattgagaattatgcgtcacgacccgaggcgtttaaggctgatgagttcctgaactggcacgccctctttgagtctatcaaaaggaaacttcctttcctcaactgggatgcctttcctaagctgaaaggactgaggagcgcaactcctgatgcccagtgaccatgacctccactggaagagggggctagcrtgagcgctgattctcaacctaccataactctttcctgcctcaggaactccaataaaacattttccatccaaaaaaaaaaaaaaagcggcc

SEQ ID NO: 175 - DNA, 1377 bp, Homo sapiens
cggggatccgagtttgcagacttcttgtgcgcagctagccgcctcaggtgtttgaaccatgaatcttttactccttttggctgtcctctgcttgggaacagccttagctactccaaaatttgatcaaacctttagtgcagagtggcaccagtggaagtccacgcacagaagactgtatggcacgaatgaggaagagtggaggagagcgatatgggagaagaacatgagaatgatccagctacacaacggggaatacagcaacgggcagcacggcttttccatggagatgaacgcctttggtgacatgaccaatgaggaattcaggcaggtggtgaatggctatcgccaccagaagcacaagaaggggaggctttttcaggaaccgctgatgcttaagatccccaagtctgtggactggagagaaaagggttgtgtgactcctgtgaagaaccagggccagtgcgggtcttgttgggcgtttagcgcatcgggttgcctagaaggacagatgttccttaagaccggcaaactgatctcactgagtgaacagaaccttgtggactgttctcacgctcaaggcaatcagggctgtaacggaggcctgatggattttgctttccagtacattaaggaaaatggaggtctggactcggaggagtcttacccctatgaagcaaaggacggatcttgtaaatacagagccgagttcgctgtggctaatgacacagggttcgtggatatccctcagcaagagaaagccctcatgaaggctgtggcgactgtggggcctatttctgttgctatggacgcaagccatccgtctctccagttctatagttcaggcatctactatgaacccaactgtagcagcaagaacctcgaccatggggttctgttggtgggctatggctatgaaggaacagattcaaataagaataaatattggcttgtcaagaacagctggggaagtgaatggggtatggaaggctacatcaaaatagccaaagaccgggacaaccactgtggacttgccaccgcggccagctatcctgtcgtgaattgatgggtagcggtaatgaggacttatggacactatgtccaaaggaattcagcttaaaactgaccaaacccttattgagtcaaaccatggtacttgaatcattgaggatccaagtcatgatttgaattctgttgccatttttacatgggttaaatgttaccmctacttaaaactcctgttataaacagctttataatattgaaaacttagtgcttaattctgagtctggaatatttgttttatataaaggttgtataaaactttctttacctcttaaaaataaattttagctcagtgtgtgtgtaaaagaaaaaaag

SEQ ID NO: 176 - DNA, 482 bp, Homo sapiens
gctttcaaggcaagatcggccttttctgttttgttttgtttttctttctttttcctggccatgagggcaaaaattactgagtggsccttaaaragggaagtttgttttcarctgttctyttttgcccgtaggtgggagggtggggattgctgcgtcctarctaraggaatggctttgcttgaatgtgtagtgcacmcgcacgggtgtttctgtgtgctagttgcttcttgctgctgcttcctgcttgtytgggrctcmcatacataacgtgatatatatatatatatataaatgtataaatawatattttatttttttttaaatccttggagcttctggttcctatcagttcctgttgttaatcgtaraaccgttgtcccttcccccattcccgtatccatcatgttctttttcttttaaatatcaatataaaggtaaaagaaaaaaaaaaaaaaaaaaaaaaaaaaaaaaaaaaaaaaaaa

SEQ ID NO: 177 - DNA, 498 bp, Homo sapiens
ccacgcgtccgaaattatcctaaagtatataagccattgattcctcctattcctgaatatgtcatttcttttcaattttggggggctgttattcttatcacatataatgctacaatgaatgtccttgtttgtgcttctttttgcacatacaagactttgttcttctgtttttggggatagatacctatacgtagatttggtggggcaagagaaactgagatgcaaaaaacctactccacagcatgcaggttttaatggtaaagttgatcaaaaagataataagcttggtaaacttataaactgtgttcttctgaaagcaatttgtgattttatactaaaagccctacaaatgtatcttatcttttgacccagaaaatgtgcctctaggaataatcagagatctttgtgaagacacctctctataaagatattcatagctattctatttgtaatagtaataaatatttcgatattcagaaaaaaaaaaaaaaaaaaaaa

SEQ ID NO: 178 - DNA, 631 bp, Homo sapiens
  misc_feature (525)..(525): n equals a,t,g, or c
  misc_feature (610)..(610): n equals a,t,g, or c
agtgattgtagcattcgttgttgcctttcataatctcagtgattctacaaatcaacaatccgtgggtaaaatggaaaaaggcacagttgacctgaaaccagaaactgcctacaacttaatacataccattctgtttggattcttggcattgagtacaatgagaatgaagtacctctggacgtcacacatgtgtgtgttcgcatcattcggcctatgtagccctgaaatatgggagttacttctgaagtcagtccatctttataacccaaagaggttctggccaggaatgatggatgaactctccgagttgagagaattctatgatccagatacagtggagctgatgaactggattaactctaacactccaagaaaggctgtgtttgcgggaagcatgcagttgctggccggagtcaagctgtgcacgggaaggaccctaaccaaccaccygcactatgaagacagcagcctgagagagcggaccagagcggtttatcagatatatgccaagagggcaccagaggnaagtgcatgccctcctaaggtccttcggcactggactacgtaatcctggaagacagcatctgcttacgagcggaggcaccgccgngggctggccgactccggggac

SEQ ID NO: 179 - DNA, 2914 bp, Homo sapiens
  misc_feature (2903)..(2903): n equals a,t,g, or c
  misc_feature (2906)..(2907): n equals a,t,g, or c
  misc_feature (2909)..(2912): n equals a,t,g, or c
  misc_feature (2914)..(2914): n equals a,t,g, or c
cgcagatttctgcccagtgtctatttttgatacggagaaactgcatcatgatgaaactcaatagatgacgtttcctatgtaagtaggtagcccaaaccttcaagctgtgatatgagtaagttctacagatgtttacacaagtgttgccatctttgaaagcatcttctacaagcagaagtctttttcgttgtgtgtctatctttctcattaatgttctttagcctaaatgttaacaactttctaagagtgacctagaattatgttgttggagagaatgatgtgtgttccatggatacctggataggcacataacatgttggaagatgagcacctgctcaggatttgaaatacgtttaattttcaggtgacttaagacagctatgattgaatcaactagagatgatgatcgacttatttaatatgatttcactggtgaagaccaattggtagctttttaaaaagcactttagtgtcctgttttaccttaaaatgttataatattttccagttgtcatgctgtcaacattaacaaaaaaaatcatgttaaggctttgtatcaaacattttgttacactctgtctgaaatgtaatgtggagtacttcagcagtatgtgtcatgtattgtgtgtgtctgtgtgtgtgcatgtgcacacatgtgttttaatgctgggcacagaaaagtgttacaagttccatatcgtaagtccttaaaggggcagaaatatatgtagccaagtagaatttattacattttagtgttattattttaaaamwtactgatwctctttaacctctcctgcagtaatagttttgctttatttcttactcatttcaatttattgggtttgcaaaattttgtaaactttttgtgtttttagcctttgtattttttacagcctagaatcttgcaaagtctgaatattttttaaatgttctatcttaactagttcactaatacagtatttttagcagacagcattttcagacagcattttcataccaagtttgacttgtggtctccaatcttactgggaaggccctggtagtgtaattcttttccttattaaaaggtaaccaagtgcctctaagtcatgcttatttgtaaacaacaaagaagagtatatgtacctgctcaaaatttttttgataatygcttatataattaatttctaatgatgaggacatgtaaaagttgccagtaagaacatagtatgcatttaattaaatcaagatggctaatggaattaactttctcccctgttcttgccaggtggaaatgatttaagcatttctccttgcagttgtattgaagtaaattaccataggcatcaagatggctgcatcacattttcaaatgattttatattcagttgctacttataaagcagcattcaaaaagtcttttacactgtcatgttggacacaagcagactcagcttttatcaaaacttgtttaaataaaaaattgacagtagctgggttattaaattatgcaactgaaactcctgaattatatcttttctgtatcccttaataagattggagaccactgccgtttaggataatacaataataaaacgttttaatcagtactaaaactttaattaagccaataatgatgcatgcctgttgtagctgacagcatgggtcagtacatccttcagcgagtgccttactctaattgaaaccaagcacacgtaaggtacaatatgttagactctgtgattttgttttcaaaatcctctgttatggctatatttaaatttrttttaaatattcctgtatgtattcatctaagcatttgggcatttggagtcttaatatacaagaaacacgtacttaaatttttatgcttatcaccgcaatgatggcaaacagtgattttttttttcatagtttaggtgtcattgttgccagcacctttagtgctcagtcttcagtgaaaaatataaagtgccaaaaaaatcttgcaagacagaatccatacttaacactctttccaagacactgtgaccatgtacagtagctatttcctgatgaccaaatctctcaacgaatcatgttattaataaatatttttagcactcatcagtattctccaatgtgaccttctcattggagtacacagaaggaaagcaaagaagagcatctgacttctagctctggcttacagcctctctaccaggccgaagcaagagacccgcggcagcagctccccgccactcagacctgggtggtgataacctcaaagaatggctctgttttctattgacagaaaacccacttgattttgcttctgagttagcagtcagaagaccctctaagtacaatagaagtgctcttaacggactctgcctgtgtgactcccaggccccggagtctccatctctctcgtaagccacctgccacagcacagctggaggctgttctctggtgttctcagcgctccggctccctccctggagttgtgcacccgtcccaaactcctccatgcaagttctgcttcctcttataagtacacaactcagttaagtattcacatacacacagaaaatacgggtgtgaaaagaaagaaytttctgtaaraattaagttgaatactytggtaaaaagtgataaaggctgagttgccaataaaagktgcttttamattaggtgtggctgggaactattatacaggatatcgggggaaactattccaatccagaaacattcctgagcttagatcggctccatacgatctcatcgaaagtaactcattcgcccacttttaaaaccttcttaactgagaagcaagggacccacaatcatggtacctggcggtgactcatggtgagaagtacgacactgcagtccattggaccctagccacgggacaaatccgggtccgatctccgcaagantanntnnnngn

SEQ ID NO: 180 - DNA, 1003 bp, Homo sapiens
ctgggccaggccattgtcactgttagttgaagaaaaagcagttcccaggtgccagcaaagaccatctttcataactgtcactgtcttggccttgagaagagagcccgctctccgtggggcaccccatggaggacacagtaccagagtttacagagagggtgggcgaacaccggtctcttcctaatctgcacagactattttgggtatttctgggcgggcagttcctttgcatgtttcgggagaggtttgttgatttggggcttatatgtcaggcctttggtttgcgtcttattttaggggttgtttgggggcctgggtggtcggcctcacatgggaaggggatgggtagtggatggggtttctgttgtatcttgtgggcgggtgattttgcttttgtttttgtttcacattcttccccctccacaagccaaagtcgtttcatttggtttccactgtgtggactgtgctggagcttggcgcctgccagaaaaatttggggctaggcaagccccaggttgcagacatggtgaagcagagaaactgttcttctggttcctgcacaacctcagaggggcaaaaaccctccccaggaaggaggagggtgttcaggagccagacttttggagagaaggcagctcccagcctgctgggtgaccgccattctgcgtgtgttccccagctgggcagggctggaagccttacgtatgaagcatggagaagcagccattgtccccactatgggcagaggggggacccggctggccccttgggtcagactggagccaacaccgccagccaccccctctggcctgctggcaatgccacaggtgcccaagaagatggaggatccctgtgccaggagccaacctggtcttcccgagggtcagtgccccagtgaagacagaagcgagagaataaagttccctgtaggtcctctgtcacctttgggttgtgtttttcaattgttgacatttcagaggggaccctccagaagcccagccgg

SEQ ID NO: 181 - DNA, 604 bp, Homo sapiens
  misc_feature (525)..(525): n equals a,t,g, or c
tcagactctgcggtggtggtgactgggggggactcakgggagagccagagcccctgctactgccacatgtttgcaccctctgactatcggaccatgatcatcagcaccatcggtgaaattgctttgwwtyctttaaatatactgggcatcaatttcctgggaagacggctgagcctttctattaccatgggatgcacggctttattctgccttctcctcaacatttgcacttcaagtgccggcctgattggcttcctcttcatgctgagggctctggtagctgcaaacttcaacaccgtctacatttacacagctgaggtctaccccaccacgatgcgcgctttggggatgggaaccagcggctccctgtgtcgcattggtgcaatggtggcaccatttatatcccaggttcttatgagtgcatcaatactgggggccctgtgtctcttctcatctgtctgtgttgtatgcgccatttctgcattcactctccccatcgaaaccaaaggacgggccctccagcanattaaatgaagacctgcaaagctatgtctaccagatgagaaaaatgaattctatcttcagaactgcggggcattttttt

SEQ ID NO: 182 - DNA, 1361 bp, Homo sapiens
  misc_feature (1336)..(1336): n equals a,t,g, or c
cgcttccagcgccgctgcgggctcttccccgctccggatgaaggcccccgggagaacggcgcggaccccacggagcgcgcggcgcgggtccccggggtcgagcatctccccgcagccaacggcaagggcggcgaggctccggccaacgggctgcgcagagccgcggcgccggaggcttatgtacagaagtacgtcgtgaagaattatttctactattacctattccaattttcagctgctttgggccaagaagtgttctacatcacgtttcttccattcactcactggaatattgacccttatttatccagaagattgatcatcatatgggttttggtgatgtatattggccaagtggccaaggatgtcttgaagtggccccgtccctcctcccctccagttgtaaaactggaaaagagactgatcgctgaatatggaatgccatccacccacgccatggcggccactgccattgccttcaccctccttatctctactatggacagataccagtatccatttgtgttgggactggtgatggccgtggtgttttccaccttggtgtgtctcagcaggctctacactgggatgcatacggtcctggatgtgctgggtggcgtcctgatcaccgcactcctcatcgtcctcacctaccctgcctggaccttcatcgactgcctggactcggccagccccctcttccccgtgtgtgtcatagttgtgccattcttcctgtgttacaattaccctgtttctgattactacagcccaacccgggcggacaccaccaccattctggctgccggggctggagtgaccataggattctggatcaaccatttcttccagcttgtatccaagcccgctgaatctctccctgttattcagaacatcccaccactcaccacctacatgttagttttgggtctgaccaaatttgcagtgggaattgtgttgatcctcttggttcgtcagcttgtacaaaatctctcactgcaagtattatactcatggttcaaggtggtcaccaggaacaaggaggccaggcggagactggagattgaagtgccttacaagtttgttacctacacatctgttggcatctgcgctacaacctttgtgccgatgcttcacaggtttctgggattaccctgagtctcaaacagttggaaactagcccactggacatgaaagccaagacataggaaagttattggtaggcaaatcttgacaacttatttttctttaacaacaacaaaaagtcatacggctgtcttgctactaccagataaatgatgctgctgtgtgaaaggaaaaaaaaaaaaaaaaaaactcnagggggggccggtaacaaattcccc

SEQ ID NO: 183 - DNA, 426 bp, Homo sapiens
  misc_feature (360)..(360): n equals a,t,g, or c
gagcctgcagccccgggtcgcgtccctccctgagcgcccccgtcggcggccatgctgccccgagggcgcccccgggcgctgggggccgccgcgctgttgctgctgctgcwgcwgctyggattcctcckgttcggtggggacctggggtgtgagcgccgcgagcctggcgggcgagcgggggccccgggatgcttccccggcccgctcatgccacgtgtccccccagacgggaggctgcggagagccgccgccctcgacggagacccgggggccggccccggggaccacaaccgctccgactgcggcccgcagccgccgccgccgcccaagtgcgaggtaggtgcgcgcggccctggcggngggagtcctgggggcgccgcccccgagcccggcctcttggacatctgcgggaatcacagtacctgg

SEQ ID NO: 184 - DNA, 627 bp, Homo sapiens
  misc_feature (541)..(541): n equals a,t,g, or c
  misc_feature (576)..(576): n equals a,t,g, or c
  misc_feature (598)..(598): n equals a,t,g, or c
  misc_feature (604)..(604): n equals a,t,g, or c
gtccagctttgttcggttgcttgtgaggagctatgatcctttggaggagaagacacactctggtttttagactttttagcttttttgctctggtttctccccatctttgtgattttatctacctttggtctttgatgatggtgacctacagatggggttttggtgtggatatcctttttgtggatgttgatgctattcctttctgtttgttagttttccttctaacagtcaggtccctcagtggcaggtctgttggagttgctggaggtccactcccgacactgtttgcctgggtatcaccagtggaggctgcagaacagcaaatattgtagaacagaatagattgctgcctgatcccttccccggaagctttgtcccataggtgcaacctgctgtatgaggtgtctgttggcccctacttggaggtgtctcctagttaggcctacatggggctcagggacccacttgaggaggcagtctgtccattctgagaactcaaacaccatgctgggagaaccactgctctcttcagaactgtcangcagggacgtttaagtctgcagaagtttccattgnctcttggtcaactatgccctgnccacanaggcggagtctgtaaaggctgta

SEQ ID NO: 185 - DNA, 528 bp, Homo sapiens
ttctttttgggctggggtcgctggcggctgcaggctctgggcatattgcctgctgcccacggtttcaaagctgccagcactcgctgggctccgcctgctgcccccccgggggtcacaggccacatggcttggtggccgaactccacgtgctggctcctcacagctgtcaccatggccttggctacccgctgcgtccctcaggagctgccatcaggttctgaggtgcctggtctggaggcagtccaggtggtgaggtctggactggctggaccccaccgatgctcctgccgtcaccccgtcctggccctcactggaggcagggacactcaggggcccggggcctcggggccagtgctgcagtggccgccgttgctctcacagcgggtccaggcctggcttctgaaggcaatgtgcctgcgtctcacactcaaaagggcctgccaggctgcacctggcggcagctcccacgggggacgatgtcctgctgtctgttggcccccaggtgggagggacggscgyggagctgca

SEQ ID NO: 186 - DNA, 522 bp, Homo sapiens
tcgacccacgcgtccgggggtgcgcacgaggccctgtattcagtccccggggagcactgccttacgctccagaagcgcaaaggcttcgtgcgcctggcgctgaggcacgggctcctggcagcattggtgccagctcaccttcaagaagctcatgggcttctctccttgcatcttctggggtcgcggtctcttctcagccacctcctggggcctgctgccctttgctgtgcccatcaccactgtggtgggccgccccatccccgtcccccagcgcctccaccccaccgaggaggaagtcaatcactatcacgccctctacatgacggccctggagcagctcttcgaggagcacaaggaaagctgtggggtccccgcttccacctgcctcaccttcatctaggcctggccgcggcctttcgctgagcccctgagcccaaggcactgagacctccacccactgtggactccatgcctccaataaaaggtagttctgggcccaaaaaaaaaaaaaaaaaaaaaaaa

SEQ ID NO: 187 - DNA, 1491 bp, Homo sapiens
gcagtgaccgtcggaattcccgggtctacccacgcgtccgcagaaagtaacggctacagacagtgagaaatagtttcgctcgccggctagaaaaactctgtcggtaccaaccccagagcgttgagagcagcccacctccacgcttccttaacggagaggtgcaggactcagacttcaccagcccactcggtcccagccttgtacgcaaagagacgtcaaggacgcgctctcccgcgtccaggcagccccagcttgctggcttgcctgcccgcctgcgtgcagcactcggccggcgtgcagcatgaccctgtggaacggcgtactgcctttttacccccagccccggcatgccgcaggcttcagcgttccactgctcatcgttattctagtgtttttggctctagcagcaagcttcctgctcatcttgccggggatccgtggccactcgcgctggttttggttggtgagagttcttctcagtctgttcataggcgcagaaattgtggctgtgcacttcagtgcagaatggttcgtgggtacagtgaacaccaacacatcctacaaagccttcagcgcagcgcgcgttacagcccgtgtcggtctgctcgtgggcctgragggcattaatattacactcacagggaccccagtgcatcagctgaacgagaccattgactacaacgagcagttcacctggcgtctgaaagagaattacgccgcggagtacgcgaacgcactggagaaggggctgccggacccagtgctctacctggcggagaagttcacaccgagtagcccttgcggcctgtaccaccagtaccacctggcgggacactacgcctcggccacgctatgggtggcgttctgcttctggctcctctccaacgtgctgctctccacgccggccccgctctacggaggcctggcactgctgaccaccggagccttcgcgctcttcggggtcttcgccttggcctccatctctagcgtgccgctctgcccgctccgcctaggctcctccgcgctcaccactcagtacggcgccgccttctgggtcacgctggcaaccggcgtcctgtgcctcttcctcggaggggccgtggtgagtctccagtatgttcggcccagcgctcttcgcacccttctggaccaaagcgccaaggactgcagccaggagagagggggctcacctcttatcctcggcgacccactgcacaagcaggccgctctcccagacttaaaatgtatcaccactaacctgtgagggggacccaatctggactccttccccgccttgggacatcgcaggccgggaagcagtgcccgccaggcctgggccaggagagctccaggaagggcactgagcgctgctggcgcgaggcctcggacatccgcaggcaccagggaaagtctcctggggcgatctgtaaataaacctttttttcttttgttttttaaaaaaaaaaaaaaaaaaaaaaaaagggcggccgc

SEQ ID NO: 188 - DNA, 725 bp, Homo sapiens
  misc_feature (689)..(689): n equals a,t,g, or c
ttcactccaccatgaccagagcacctctcctgctactatgtgttgccctggtgctgcttgggcatgtgaatggagccacagtaagaaatgaggacaaatggaagccactcaacaaccccagaaacagagatctgtttttcagaaggcttcaggcatattttaagggcagaggtcttgatcttggaacatttccaaatcctttccccacgaatgaaaatcctagacctctctctttccagtcagaacttactgcttctgcatctgcagattatgaagagcagaaaaactcctttcacaattatctcaaaggctgaaagtttcttctgagctcaggtgtctggctattttaaaactacagatgaagcttctcattagaaaaattcaaccattgtcatagctaaactttcatggagtttctttccccctcacttttatttttcagtttgtaatgattttattccacatttccatatttacatataaatcgctggaactatgatttctatgcatatttatggagtttttttcctatgaaaccataaatattgatgtagagcaccgcatgtatttgtaggagttacaaaaacatcacaaactgaaaaaagattataatctaaattagatgtttctttaagcttgtttttaaacttgkcttttatgtttattatctttatcgaccaatatattgntttaaagggccatgctcacttttagtatagtaaaat

SEQ ID NO: 189 - DNA, 616 bp, Homo sapiens
ggtttaaaatttgtcttcctttcctaaaaagaagatgcattcccatgttcagcatacactaccaaaatacttcacagttttagtttcataagaaatgagggcaagtgataaacagccccaattaagttaaaatggaagcaaacaacaccaacaaacatgggattytagaagttgtcaacgcctccaaagatgctctttgccagagtattcagaggtggacattgtgccccatcaaatattctagcaatgcccgagcccttgctttcatacacaacctcctcaggaaggaaaagtagaaacaggtgatttcctctctttccaaccagcccctgctctccttactctagstcatgctgagttattctgattcccatactcmcatttggaatagctgcttttcctgtatctttatagatagctgcatcatcttctctgtgattcctgcaaaaggaatgttgcmctaaaatgcaacattgtcctaacattagtctgtgcatttcaaaatattttaatgtggcttttttgggtggattattgatattgtatatgaagaataaaatatttgtgcaagaaccaaaaaaaaaaaaaaaaaaaaaaaaaaaaaaaaaaaaaaaag

SEQ ID NO: 190 - DNA, 677 bp, Homo sapiens
ggaattcccgggctgggatcagccactgcagctccctgagcactctctacagagacgcggaccccagacatgaggaggctcctcctggtcaccagcctggtggttgtgctgctgtgggaggcaggtgcagtcccagcacccaaggtccctatcaagatgcaagtcaaacactggccctcagagcaggacccagagaaggcctggggcgcccgtgtggtggagcctccggagaaggacgaccagctggtggtgctgttccctgtccagaagccgaaactcttgaccaccgaggagaagccacgaggtcagggcaggggccccatccttccaggcaccaaggcctggatggagaccgaggacaccctgggccgtgtcctgagtcccgagcccgaccatgacagcctgtaccaccctccgcctgaggaggaccagggcgaggagaggccccggttgtgggtgatgccaaatcaccaggtgctcctgggaccggaggaagaccaagaccccattttccccccccagtaggggttcaggggccatccctgcccccgccctgttccaaggcccaggctgttggggctggggccctcccttccctgccccagcttgacaaattaaccccagcaggccgggaaaaaaaaaaaaaaaaaaaaaaaaaaaaaaaaaaaaaaaaaaaa

SEQ ID NO: 191 - DNA, 835 bp, Homo sapiens
  misc_feature (22)..(22): n equals a,t,g, or c
gtccccgctcagatccaggccncgaatgggctgggcgggttgcagaagccatcacctgagctacccagggtgggatccctggccccgacctctgtcctgacacgccccaagcggcagcaacaaagccccaattggcctgggcctgggcaggaggagctgggccgggtgccagatactgggatcagccactgcagctccctgagcactctctacagagacgcggaccccagacatgaggaggctcctcctggtcaccagcctggtggttgtgctgctgtgggaggcaggtgcagtcccagcacccaaggtccctatcaagatgcaagtcaaacactggccctcagagcaggacccagagaaggcctggggcgcccgtgtggtggagcctccggagaaggacgaccagctggtggtgctgttccctgtccagaagccgaaactcttgaccaccgaggagaagccacgaggtcagggcaggggccccatccttccaggcaccaaggcctggatggagaccgaggacaccctgggccgtgtcctgagtcccgagcccgaccatgacagcctgtaccaccctccgcctgaggaggaccagggcgaggagaggccccggttgtgggtgatgccaaatcaccaggtgctcctgggaccggaggaagaccaagaccacatctaccacccccagtagggctccaggggccatcactgcccccgccctgtcccaaggcccaggctgttgggactgggaccctccctaccctgccccagctagacaaataaaccccagcaggccgggmaaaaaaaaaaaaaaaaaaaaaaaaaaaaaaaaactcga

SEQ ID NO: 192 - DNA, 713 bp, Homo sapiens
ccacgcgtccgcagacatgaggaggctcctcctggtcaccagcctggtggttgtgctgctgtgggaggcaggtgcagtcccagcacccaaggtccctatcaagatgcaagtcaaacactggccctcagagcaggacccagagaaggcctggggcgcccgtgtggtggagcctccggagaaggacgaccagctggtggtgctgttccctgtccagaagccgaaactcttgaccaccgaggagaagccacgaggcaccaaggcctggatggagaccgaggacaccctgggccgtgtcctgagtcccgagcccgaccatgacagcctgtaccaccctccgcctgaggaggaccagggcgaggagaggccccggttgtgggtgatgccaaatcaccaggtgctcctgggaccggaggaagaccaagaccacatctaccacccccagtagggctccaggggccatcactgcccccgccctgtcccaaggcccaggctgttgggactgggaccctccctaccctgccccagctagacaaataaaccccagcaggccgggcgcggtggctcacctctgtaatcccagcacttttagaggccgaggcaggcggatcacctgaaatcaggagttccagaccagcctgggcaacatggtgaaaccccgtctctactaaaaatccaaaaattaaaaaaaaaaaaaaaaaaaaaaaaaaaaaaaa

SEQ ID NO: 193 - DNA, 541 bp, Homo sapiens
cagacatgaggaggctcctcctggtcaccagcctggtggttgtgctgctgtgggaggcaggtgcagtcccagcacccaaggtccctatcaagatgcaagtcaaacactggccctcagagcaggacccagagaaggcctggggcgcccgtgtggtggagcctccggagaaggacgaccagctggtggtgctgttccctgtccagaagccgaaactcttgaccaccgaggagaagccacgaggcaccaaggcctggatggagaccgaggacaccctgggccgtgtcctgagtcccgagcccgaccatgacagcctgtaccaccctccgcctgaggaggaccagggcgaggagaggccccggttgtgggtgatgccaaatcaccaggtgctcctgggaccggaggaagaccaagaccacatctaccacccccagtagggctccaggggccatcactgcccccgccctgtcccaaggcccaggctgttgggactgggaccctcctaccctgccccagctagacaaataaaccccagcaggccggg

SEQ ID NO: 194 - DNA, 543 bp, Homo sapiens
aggctgtgaggggcgggagcgctgctggaacccgagccggagccggagccacagcggggagggtggcctggcggcctggagccggacgtgtccggggcgtccccgcagaccggggcagcaggtcgtccgggggcccaccatgctggtgactgcctaccttgcttttgtaggcctcctggcctcctgcctggggctggaactgtcaagatgccgggctaaaccccctggaagggcctgcagcaatccctccttccttcggtttcaactggacttctatcaggtctacttcctggccctggcagctgattggcttcaggccccctacctctataaactctaccagcattactacttcctggaaggtcaaattgccatcctctatgtctgtggccttgcctctacagtcctctttggcctagtggcctcctcccttgtggattgsctgggtcgcaagaattcttgtgtcctcttctccctgacttactcactatgctgcttaaccaaactctctcaagactactttgtgctgctagtggggcgagc

SEQ ID NO: 195 - DNA, 1859 bp, Homo sapiens
gggcggcggccagaggsctgcccggctcccggaagcaggctgtgaggggcgggagcgctgctggaacccgagccggagccggagccacagcggggagggtggcctggcggcctggagccggacgtgtccggggcgtccccgcagaccggggcagcaggtcgtccgggggcccaccatgctggtgactgcctaccttgcttttgtaggcctcctggcctcctgcctggggctggaactgtcaagatgccgggctaaaccccctggaagggcctgcagcaatccctccttccttcggtttcaactggacttctatcaggtctacttcctggccctggcagctgattggcttcaggccccctacctctataaactctaccagcattactacttcctggaaggtcaaattgccatcctctatgtctgtggccttgcctctacagtcctctttggcctagtggcctcctcccttgtggattggctgggtcgcaagaattcttgtgtcctcttctccctgacttactcactatgctgcttaaccaaactctctcaagactactttgtgctgctagtggggcgagcacttggtgggctgtccacagccctgctcttctcagccttcgaggcctggtatatccatgagcacgtggaacggcatgacttccctgctgagtggatcccagctacctttgctcgagctgccttctggaaccatgtgctggctgtagtggcaggtgtggcagctgaggctgtagccagctggatagggctggggcctgtagcgccctttgtggctgccatccctctcctggctctggcaggggccttggcccttcgaaactggggggagaactatgaccggcagcgtgccttctcaaggacctgtgctggaggcctgcgctgcctcctgtcggaccgccgcgtgctgctgctgggcaccatacaagctctatttgagagtgtcatcttcatctttgtcttcctctggacacctgtgctggacccacacggggcccctctgggcattatcttctccagcttcatggcagccagcctgcttggctcttccctgtaccgtatcgccacctccaagaggtaccaccttcagcccatgcacctgctgtcccttgctgtgctcatcgtcgtcttctctctcttcatgttgactttctctaccagcccaggccaggagagtccggtggagtccttcatagcctttctacttattgagttggcttgtggattatactttcccagcatgagcttcctacggagaaaggtgatccctgagacagagcaggctggtgtactcaactggttccgggtacctctgcactcactggcttgcctagggctccttgtcctccatgacagtgatcgaaaaacaggcactcggaatatgttcagcatttgctctgctgtcatggtgatggctctgctggcagtggtgggactcttcaccgtggtaaggcatgatgctgagctgcgggtaccttcacctactgaggagccctatgcccctgagctgtaaccccactccaggacaagatagctgggacagactcttgaattccagctatccgggattgtacagatctctctgtgactgactttgtgactgtcctgtggtttctcctgccattgctttgtgtttgggaggacatgatgggggtgatggactggaaagaaggtgccaaaagttccctctgtgttactcccatttagaaaataaacacttttaaatgatcaaaaaaaaaaaaaaaaagggcggccgctctagaggatccctcgaggggcccaagcttacgcgtgcatgcgacgtcatagctctctccctatagtgagtcgtattataagctagg

SEQ ID NO: 196 - DNA, 594 bp, Homo sapiens
ctcttcatgttgactttctctaccagcccaggccaggagagtccggtggagtccttcatagcctttctacttattgagttggcttgtggattatactttcccagcatgagcttcctacggagaaaggtgatccctgagacagagcaggctggtgtactcaactggttccgggtacctctgcactcactggcttgcctagggctccttgtcctccatgacagtgatcgaaaaacaggcactcggaatatgttcagcatttgctctgctgtcatggtgatggctctgctggcagtggtgggactcttcaccgtggtaaggcatgatgctgagctgcgggtaccttcacctactgaggagccctatgcccctgagctgtaaccccactccaggacaagatagctgggacagactcttgaattccagctatccgggattgtacagatctctctgtgactgactttgtgactgtcctgtggtttctcctgccattgctttgtgtttgggaggacatgatgggggtgatggactggaaagaaggtgccaaaagttccctctgtgttactcccatttagaaaataaacacttttaaatgat

SEQ ID NO: 197 - DNA, 651 bp, Homo sapiens
ctgggtccccagggagaaggtggcaaccccaggacagcagcctcctaccctgaactacaggcaacatcgtcggccccctggcactgcacctgcactgtgggcagagaaggagggaaggctgggagaggaggaggaggtcgaatgtcgctggaggtcagcgtccttctgcagccgtggcttcatggggtttaagtacgatgatgctgcattgagacgttgtactgtgtgaagtcagggccttctgtgcatcggtcgagggtgcaatgcacacggcacccccgagcagccacccatcctcccttccctccaccctgcgaggccccgttgtccgtctgtccacactctgctccatgagcacacgtgacttagcttcgccttgtgagccgctgcttggggtgagcatgcttcctgctggatgcttctctatgtaagcacctgcctgagtgtcagccctcttaaggtgaaccgctccgtgtcattcgtacattcacaagtttgtgccgccatcatcgtgatcggattccaaaacattttcatcacctccaagaaagccttgtacctggcagcagtcactgtctctatggatttgcttattytggacatttcataaaaatagaatcmamcagcaaaaaaaaaaaaaaaaaaaaaaaa

SEQ ID NO: 198 - DNA, 1292 bp, Homo sapiens
cacgcgtccggcaggcatatggagtatgaatgcccctacttggtatatgtgcccttgggctccaagcggaaggcgaccacgaattgctctggggctacaaagatgaaatcttgtcccttatccatgttttcaggcccgatatctctccctattttggcctattctatgagaaaaatgggactaatgatggagactatgtttttctaactggagaagacagttaccttaactttacaaaaattgtggaatggaatgggaaaacgtcacttgactggtggataacagacaagtgcaatatgattaatggaacagatggagattcttttcacccactaataaccaaagatgaggtcctttatgtcttcccatctgacttttgcaggtcagtgtatattactttcagtgactatgagagtgtacagggactgcctgcctttcggtataaagttcctgcagaaatattagccaatacgtcagacaatgccggcttctgtatacctgagggaaactgcctgggctcaggagttctgaatgtcagcatctgcaagaatggtgcacccatcattatgtctttcccacacttttaccaagcagatgagaggtttgtttctgccatagaaggcatgcacccaaatcaggaagaccatgagacatttgtggacattaatcctttgactggaataatcctaaaagcagccaagaggttccaaatcaacatttatgtcaaaaaattagatgactttgttgaaacgggagacattagaaccatggttttcccagtgatgtacctcaatgagagtgttcacattgataaagagacggcgagtcgactgaagtctatgattaacactactttgatcatcaccaacataccctacatcatcatggcgctgggtgtgttctttggtttggtttttacctggcttgcatgcaaaggacagggatccatggatgagggaacagcggatgaaagagcacccctcattcgaacctaaacattgcctttgcttggtgaagaaactgtgtgagctgtcctgacctggacgatgacgtggggaaaccctccacctccttgcaggcttgttgcctgttgaaagaaggaaaaagacacggcgctggcaagtgataggaacattctggccagaggttaaagagcaggctgacatggctggccattaagctttataaaatcatgtgggctctgaaattgttcttttatgtgtctagcaagtatttaataaacccttgtatagtaaaaaaaaaaaaaaaaaaaaaaaaaaaaaaaaaaaaag

SEQ ID NO: 199 - DNA, 4476 bp, Homo sapiens
  misc_feature (1837)..(1837): n equals a,t,g, or c
catcttgcgcgcagctggagtcggtgcctgaggttgcagccgagagtgtgcgccagcccgcggcccagccgaagctctttcccgccgcctctccgcgcctcgcccaggttcagcyccgcctgaccctccgcttggcacggtcccctgaccctcagtccggccyggtccggcctyccagccgccccggggacgatgaacggaggataaatggtgcccaaggcagacagcggcgccttcctgctgctcttcctgctcgtgctcactgtcaccgagccgctgcggccagagctgcggtgcaaccctgggcagtttgcgtgtcgcagcggcamcatccagtgcatccccctcccctggcagtgtgacggctgggcgamttgcgaggatgagagcgacgaagccaaytgtccagaagtgamcggggargtgcgtcctcatcatgggaaggaggctgtggatccgcggcaggggcgggccagaggaggcgacccttcgcacttccacgcggtgaacgtggcgcaccgttcgcttcagcagtttcctagggaagtgcccgacagggtggcaccactacgaaggcacggccagctgctaccgggtctacctgagcggggagaactactgggatgccgcgcagacctgccagcgcctgaatggctctctcgccaccttctccactgaccaggagctgcgctttgtcctggcccaggaatgggaccagcccgagcggagctttggttggaaggaccagcgcaagttgtgggttggctatcagtatgttatcactggccggaaccgctccttggaaggtcgctgggaggtggcattcaaaggctcttcagaggtgttcctgcccccagaccccatctttgcctcggccatgtctgagaacgacaacgtgttctgtgcccagcttcagtgcttccatttccccacyctgcggcaccacgacctccacagctggcacgccgagagctgctacgagaagtcttcatttctgtgtaaaagaagtcaaacatgtgttgacatcaaggacaacgtggtggatgaagggttctacttcacccctaagggggacgacccatgcctgagctgcacctgccatggaggggagcctgagatgtgtgtggctgctctctgtgagaggccccagggctgccaacagtaccgcaaggaccccaaagagtgctgcaagttcatgtgtctggacccagatggcaacagtctgtttgactccatggccagcgggatgcgcctggtcgtcagctgcatctcctccttcctcatcctgtcactgctgctcttcatggtccaccggctgcgccagcggcgccgggagcgcatcgagtccctgattggagcaaacttgcaccacttcaacctcggccgcaggatccctggctttgattacggcccagacgggtttggcacgggcctcacgccgctgcatctttctgacgacggagagggtgggactttccatttccacgaccctccacctccctacacggcatacaagtacccggacatcggccagcccgacgaccctccgccgccctacgaggcctccatccacccggacagtgtgttctatgaccctgcagacgatgatgcttttgagcctgyggaggtcagcctgccagcccctggggatggtgggagtgaaggtgcattactccggcgcctggagcagcctctgcccactgcgggggcctctctggcagacctggaagactctgccgacagcagcagcgccctgctcgtgccccctgaccctgcccagagcgggagcaccccagctgcagaggcactgccagggggtggccgccacagccgcagntccctcaatactgtggtgtagacggcctggcctgtaccccaacggtctgggagcacctgtctgttgtagaaaacaccggtccctggggagamttgaaaggcccctgtcccagcctggacgccacgcactgccgcamgtcactggcgggctcgcgtgtgtacatagagaccacagcccgccttctgccaaaagaagtgatggcctgcaccgagcttccttgagggcttcagaaacatgcatagctttggatcactgtcttctcctttataaatggcagaagagtgacaaaattcattcagaccgcacatgttagaggcagggaatgaagaaggtactktgggccatggccacacctgatgcgtttttggtgggcttacttggtgcagtgtgctgtccagagagacctgctgacccagtctgggacaggcacagtgggagctgccacagtgccccttgctggccgccctcaggagggggcctctggaccgtcagtgtggcgtaggcagtgggtctgcttcagggaggcagcctcttgactttgtcacaacggttgcactgaagatggcccccacaagcccagttgtgaatatcaaggtgaccctgcccctggctgggagctcccctggggctctggaacctgaagccctgagaaggagagcttggaaggaggttgagctcttcactgtgtctttccatctgggctctgcagcccagctctgtggcaggaggcctgaccccaccccatcagtccctctcccagcattgctgtgcatggctccctcaggaagaagctctggagtggggccgaggccccagatgctctgctggggtctggggactgagctgcctcctgtctctccactctggagccctgggctcttgcctcctgttgaattgcccctgggcctgcccccggccccatttgtgccataaagggttgcttcattgcaggaggggtggctgaaaccaccatcctgggctgcatctatctccttaaagtccactccttacatcaccgccactactgcagctcagtgcccagcggccgcatgcacacctcccggcccckcctcagcagcgcaggggctgggggcccttcctggcacccttttgcctgacggaccctgttgcctgctcctgggcagtggttttgttgcctgacacagggcctttaacatttctgaggtttggagattaagcgggttctgtgcgatttttagcacatccatatcttttctacgttgaatgtctggatctttcctttgtatgtttgtgtctctgtgtgtgtatgtggccaagcgtctgcaggtgagggtggcacatggaacttcacgggtcactgggggcccactcttccagggtcatcgatgcatcctgggctgtgctgaggcagtgctgtctcgctcagtctttccagaccagcggggcagcacctgggaggcctgtctgaagcatgcagttctgtggtgctgctcggggatggactccatgcacagtccacttcttgacacattctcacactgtggctggagacccattttttccatcccatgtggaatgagaatcttgagttgcccacagacagacttgacctttgtgccagaactgtccagagctgtgagttttgttactgaattgcctgtccctgagcttggcctgctggagcatgatgctggaggctgtgtgcgggcaggcttgtgctccccttggagaagggctgctacttaacaaggaagtcctggccacaagagtcccctactggctgcagaggacgaagcaggaagcatgccgtggatcccacatgcactggggcagggcagccaggttccagagcagcaggcatgtgcattatgggtgccaggtggccagtgagggcccgaggaccacgcagcagagtcccccacgggcctgagcctgagagctcagaggattcctgccaggcctcagaactgtgtgtgcgggacagggtggctggcacgagatgtgtgggactgggacgcttcctttggggaccagaggaacattaggggccggtcagacacgtagggggcagtgaggaaacggggtaaagtggaccatgcaggctgcagagggtgggccttgggctggccggggttgctgggtggccccttccccatgggcctccacaagcactcaggccactggcacgttgggccaggcagaaggtccacatggcagggctgcctggaacaccgctgccactgtggctccaggaggcccttgggagcatgaggagagctggactcgctcatctgttcttgcaccaccatccagaatgccccctttgcaaggcctgctgcagtccccagtctgaccagcaagtcccggggtcacccttgctgaaccttgtgctccaggggtcctcctcctctaggaccagcttgccacggtttctcagagcccaggtgccctctgacctgccatgcggaggtgggatttgatactgtacattgtcttgatgcctgtttttttatgttttcattaagggtttttagtttttggttgggttgacactaacttttcttaagatgctgtgagaatcatttcatccaaatgccaaataaacttgtgttccggaaaaaaaaaaaaaaaaaaaaaaaaaaaaaaaaaaaaaaaac

SEQ ID NO: 200 - DNA, 682 bp, Homo sapiens
  misc_feature (1)..(1): n equals a,t,g, or c
  misc_feature (604)..(607): n equals a,t,g, or c
ncctcccggtaccggtccggaattcccgggtcgacccacgcgtccgctcgctttgagtgactgggttttgtgattgcctctgaagcctatgtatgccatggaggcactaacaaactctgaggtttccgaaatcagaagcgaaaaaatcagtgaataaaccatcatcttgccactaccccctcctgaagccacagcagggtttcaggttccaatcagaactgttggcaaggtgacatttccatgcataaatgcgatccacagaaggtcctggtggtatttgtaactttttgcaaggcatttttttatatatatttttgtgcacatttttttttacgtttctttagaaaacaaatgtatttcaaaatatatttatagtcgaacaattcatatatttgaagtggagccatatgaatgtcagtagtttatacttctctattatctcaaactactggcaatttgtaaagaaatatatatgatatataaatgtgattgcagcttttcaatgttagccacagtgtattttttcacttgtactaaaattgtatcaaatgtgacattatatgcactagcaataaaatgctaattgkttcatggtaaaaaaaannnnctactgtatgtgggaatttatttacctgaaataaaattcattagttgttagtgatggagcttaaaaaaaaaaaaa

SEQ ID NO: 201 - DNA, 671 bp, Homo sapiens
atacagtgtggtgaaggttgactgaagaagtccagtgtgtccagttaaaacagaaataaattaaactcttcatcaacaaagacctgtttttgtgcctgccttgagttttatcagaattattggcctagtaatccttcagaaacaccgtaattctaaataaacctcttcccatacacctttcccccataagatgtgtcttcagcactataaagcatttgtattgtgatttgattaagtatatatttggttgttctcaatgaagagcaaatttaaatattatgtgcatttgtaaatacagtagctataaaattttccatacttctaatggcagaatagaggaggccatattaaataatgctgatgaaaggcaggccactgcattgtaaataggattttctaggctcggtaggcagaaagaattatttttctttgaaggaaataactttttatcatggtaattttgaaggatgattcctatgatgtgttcaccaggggaatgtggcttttaaagaaaatcttctattggttgtaactgttcatatcttcttacttttatgagatgacttcattattcccatggtattggccttttaaactatgtgcctctgagtctttcaatttataaatttgttatcttaataaatattataaaaatgwaaaaaaaaaaaaaa

SEQ ID NO: 202 - DNA, 1088 bp, Homo sapiens
cgggtcgacccacgcgtccgcttgcctgggagaggggaagcagatctgaggacatctctgtgccaggccagaaaccgcccacctgcagttccttctccgggatggacgtggggcccagctccctgccccaccttgggctgaagctgctgctgctcctgctgctgctgcccctcaggggccaagccaacacaggctgctacgggatcccagggatgcccggcctgcccggggcaccagggaaggatgggtacgacggactgccggggcccaagggggagccaggaatcccagccattcccgggatccgaggacccaaagggcagatacaagcagaaattccagtcagtgttcacggtcactcggcagacccaccagccccctgcacccaacagcctgatcagattcaacgcggtcctcaccaacccgcagggagattatgacacgagcactggcaagttcacctgcaaagtccccggcctctactactttgtctaccacgcgtcgcatacagccaacctgtgcgtgctgctgtaccgcagcggcgtcaaagtggtcaccttctgtggccacacgtccaaaaccaatcaggtcaactcgggcggtgtgctgctgaggttgcaggtgggcgaggaggtgtggctggctgtcaatgactactacgacatggtgggcatccagggctctgacagcgtcttctccggcttcctgctcttccccgactagggcgggcagatgcgctcgagacccacgggccttccacctccctcagcttcctgcatggacccaccttactggccagtctgcatccttgcctagaccattctcccctccagggagcccaccctgacccacccccactgcaccccctccccatgggttctctccttcctctgaacttctttaggagtcactgcttgtgtggttcctgggacacttaaccaatgccttctggtactgccattcttttttttttttttcaagtattggaaggggtggggagatatataaataaatcatgaaatcaatamaaaaaaaaaaaaaaaaaaaaaaaaaaaaaaaaaaaaaaaaaaaaaaaaaaaagggcggcc

SEQ ID NO: 203 - DNA, 838 bp, Homo sapiens
ggacgcgtgggttcatagaagggatctaccgaacagaaagggacaaagggacattgtatgagctcaccttcaaaggggaccacaaacacgaattcaaacggctcatcttatttcgaccattcggccccatcatgaaagtgaaaaatgaaaagctcaacatggccaacacgcttatcaatgttatcgtgcctctagcaaaaagggtggwcaagttccggcagttcatgcagaatttcagggagatgtgcattgagcaggatgggagagtccatcttcactgttgtttactttgggaaagaagaaataaatgaagtcaaaggaatacttgaaaacacttycaaagctgccaacttcaggaactttaccttcatccagctgaatggagaattttctcggggaaagggacttgatgttggagcccgcttctggaagggaagcaacgtccttctctttttctgtgatgtggacatctacttcccatctgaattcctcaatacgtgtaggctgaatacacagccagggaagaaggtattttatccagttcttttcagtcagtacaatcctggcataatatacggccaccatgatgcagtccctcccttggaacagcagctggtcataaagaaggaaactggattttggagagactttggatttgggatgacgtgtcagtatcggtcagacttcatcaatataggtaggacaaatctgcatctctactgccacccagaggccacgggcccatgtaggccttgaaggaatcaagtagggtttccaaggagtctggttgggaaggatggttccattgccttcaaaaaaaaaaaaaaaaaaaaaaaag

SEQ ID NO: 204 - protein, 88 aa, Homo sapiens
MHLRLCHFSAQHPLGALPRLPFLAALLALVTLAYFRLISSQGLCTFSLCLECPFPDVCLAYATCTSFRHKRGPHNPEQPFPTPPYHLL

SEQ ID NO: 205 - protein, 210 aa, Homo sapiens
MLVGGIIGGHVSDRFGRRFILRWCLLQLAITDTCAAFAPTFPVYCVLRFLAGFSSMIIISNNSLPITEWIRPNSKALVVILSSGALSIGQIILGGLAYVFRDWQTLHVVASVPFFVFFLLSRWLVESARWLIITNKLDEGLKALRKVARTNGIKNAEETLNIEVVRSTMQEELDAAQTKTTVCDLFRNPSMRKRICILVFLRKKNLKEKA

SEQ ID NO: 206 - protein, 167 aa, Homo sapiens
  SITE (154): Xaa equals any of the naturally occurring L-amino acids
MRQTLPLLLLTVLRPSWADPPQEKVPLFRVTQQGPWGSSGSNATDSPCEGLPAADATALTLANRNLERLPGCLPRTLRSLDASHNLLRALSTSELGHLEQLQVLTLRHNRIAALRWGPGGPAGLHTLDLSYNQLAALPPCAGPALSSFRALALXRNPLRALQPRAFA

SEQ ID NO: 207 - protein, 196 aa, Homo sapiens
MWFMYLLSWLSLFIQVAFITLAVAAGLYYLAELIEEYTVATSRIIKYMIWFSTAVLIGLYVFERFPTSMIGVGLFTNLVYFGLLQTFPFIMLTSPNFILSCGLVVVNHYLAFQFFAEEYYPFSEVLAYFTFCLWIIPFAFFVSLSAGENVLPSTMQPGDDVVSNYFTKGKRGKRLGILVVFSFIKEAILPSRQKIY

SEQ ID NO: 208 - protein, 84 aa, Homo sapiens
MSCFCDIISFHSLSWSLVLLLLLKPPTLSTSGSLYKFSLLATFPPQIFHIINVSVYMLPPERGLHWLFFFNSTSTQICSVHPLQ

SEQ ID NO: 209 - protein, 400 aa, Homo sapiens
MAWRRREASVGARGVLALALLALALCVPGARGRALEWFSAVVNIEYVDPQTNLTVWSVSESGRFGDSSPKEGAHGLVGVPWAPGGDLEGCAPDTRFFVPEPGGRGAAPWVALVARGGCTFKDKVLVAARRNASAVVLYNEERYGNITLPMSHAGTGNIVVIMISYPKGREILELVQKGIPVTMTIGVGTRHVQEFISGQSVVFVAIAFITMMIISLAWLIFYYIQRFLYTGSQIGSQSHRKETKKVIGQLLLHTVKHGEKGIDVDAENCAVCIENFKVKDIIRILPCKHIFHRICIDPWLLDHRTCPMCKLDVIKALGYWGEPGDVQEMPAPESPPGRDPAANLSLALPDDDGSDESSPPSASPAESEPQCDPSFKGDAGENTALLEAGRSDSRHGGPIS

SEQ ID NO: 210 - protein, 125 aa, Homo sapiens
MTSFLKPSPPMASMSSPLWVCLFTSGCSLSVSSMGSSSSCSHTNHLAASRTYHGLCHMLFPLFRMVSSPSLCLANSSSSFSSPLILNVFREASLDLLVRSHFLVIYSFIALSLGATSPSLVWLLE

SEQ ID NO: 211 - protein, 294 aa, Homo sapiens
MRPRAPACAAAALGLCSLLLLLAPGHACPAGCACTDPHTVDCRDRGLPSVPDPFPLDVRKLLVAGNRIQRIPEDFFIFYGDLVYLDFRNNSLRSLEEGTFSGSAKLVFLDLSYNNLTQLGAGAFRSAGRLVKLSLANNNVVGVHEDAFETLESLQVLELNDNNLRSLSVAALAALPALRSLRLDGNPWLCDCDFAHLFSWIQENASKLPKGLDEIQCSLPMESRRISLRELSEASFSECRFSLSLTDLCIIIFSGVAVSIAAIISSFFLATVVQCLQRCAPNKDAEDEDEDEDD

SEQ ID NO: 212 - protein, 283 aa, Homo sapiens
MVSAAAPSLLILLLLLLGSVPATDARSVPLKATFLEDVAGSGEAEGSSASSPSLPPPWTPALSPTSMGPQPTTLGGPSPPTNFLDGIVDFFRQYVMLIAVVGSLAFLLMFIVCAAVITRQKQKASAYYPSSFPKKKYVDQSDRAGGPRAFSEVPDRAPDSRPEEALDSSRQLQADILAATQNLKSPTRAALGGGDGARMVEGRGAEEEEKGSQEGDQEVQGHGVPVETPEAQEEPCSGVLEGAVVAGEGQGELEGSLLLAQEAQGPVGPPESPCACSSVHPSV

SEQ ID NO: 213 - protein, 396 aa, Homo sapiens
MSATDRMGPRAVPGLRLALLLLLVLGTPKSGVQGQEGLDFPEYDGVDRVINVNAKNYKNVFKKYEVLALLYHEPPEDDKASQRQFEMEELILELAAQVLEDKGVGFGLVDSEKDAAVAKKLGLTEVDSMYVFKGDEVIEYDGEFSADTIVEFLLDVLEDPVELIEGERELQAFENIEDEIKLIGYFKSKDSEHYKAFEDAAEEFHPYIPFFATFDSKVAKKLTLKLNEIDFYEAFMEEPVTIPDKPNSEEEIVNFVEEHRRSTLRKLKPESMYETWEDDMDGIHIVAFAEEADPDGFEFLETLKAVAQDNTENPDLSIIWIDPDDFPLLVPYWEKTFDIDLSAPQIGVVNVTDADSVWMEMDDEEDLPSAEELEDWLEDVLEGEINTEDDDDDDDD

SEQ ID NO: 214 - protein, 672 aa, Homo sapiens
MQKASVLLFLAWVCFLFYAGIALFTSGFLLTRLELTNHSSCQEPPGPGSLPWGSQGKPGACWMASRFSRVVLVLIDALRFDFAQPQHSHVPREPPVSLPFLGKLSSLQRILEIQPHHARLYRSQVDPPTTTMQRLKALTTGSLPTFIDAGSNFASHAIVEDNLIKQLTSAGRRVVFMGDDTWKDLFPGAFSKAFFFPSFNVRDLDTVDNGILEHLYPTMDSGEWDVLIAHFLGVDHCGHKHGPHHPEMAKKLSQMDQVIQGLVERLENDTLLVVAGDHGMTTNGDHGGDSELEVSAALFLYSPTAVFPSTPPEEPEVIPQVSLVPTLALLLGLPIPFGNIGEVMAELFSGGEDSQPHSSALAQASALHLNAQQVSRFLHTYSAATQDLQAKELHQLQNLFSKASADYQWLLQSPKGAEATLPTVIAELQQFLRGARAMCIESWARFSLSFLLLHLLAAGIPVTTPGPFTVPWQAVSAWALMATQTFYSTGHQPVFPAIHWHAAFVGFPEGHGSCTWLPALLVGANTFASHLLFAVGCPLLLLWPFLCESQGLRKRQQPPGNEADARVRPEEEEEPLMEMRLRDAPQHFYAALLQLGLKYLFILGIQILACALAASILRRHLMVWKVFAPKFIFEAVGFIVSSVGLLLGIALVMRVDGAVSSWFRQLFLAQQR

SEQ ID NO: 215 - protein, 160 aa, Homo sapiens
MEGAELAGKILSTWLTLVLGFILLPSVFGVSLGISEIYMKILVKTLEWATIRIEKGTPKESILKNSASVGIIQRDESPMEKGLSGLRGRDFELSDVFYFSKKGLEAIVEDEVTQRFSSEELVSWNLLTRTNVNFQYISLRLTMVWVLGVIVRYCVLLPLR

SEQ ID NO: 216 - protein, 215 aa, Homo sapiens
MGLEKPQSKLEGGMHPQLIPSVIAVVFILLLSVCFIASCLVTHHNFSRCKRGTGVHKLEHHAKLKCIKEKSELKSAEGSTWNCCPIDWRAFQSNCYFPLTDNKTWAESERNCSGMGAHLMTISTEAEQNFIIQFLDRRLSYFLGLRDENAKGQWRWVDQTPFNPRRVFWHKNEPDNSQGENCVVLVYNQDKWAWNDVPCNFEASRICKIPGTTLN

SEQ ID NO: 217 - protein, 535 aa, Homo sapiens
MKLWVSALLMAWFGVLSCVQAEFFTSIGHMTDLIYAEKELVQSLKEYILVEEAKLSKIKSWANKMEALTSKSAADAEGYLAHPVNAYKLVKRLNTDWPALEDLVLQDSAAGFIANLSVQRQFFPTDEDEIGAAKALMRLQDTYRLDPGTISRGELPGTKYQAMLSVDDCFGMGRSAYNEGDYYHTVLWMEQVLKQLDAGEEATTTKSQVLDYLSYAVFQLGDLHRALELTRRLLSLDPSHERAGGNLRYFEQLLEEEREKTLTNQTEAELATPEGIYERPVDYLPERDVYESLCRGEGVKLTPRRQKRLFCRYHHGNRAPQLLIAPFKEEDEWDSPHIVRYYDVMSDEEIERIKEIAKPKLARATVRDPKTGVLTVASYRVSKSSWLEEDDDPVVARVNRRMQHITGLTVKTAELLQVANYGVGGQYEPHFDFSRNDERDTFKHLGTGNRVATFLNYMSDVEAGGATVFPDLGAAIWPKKGTAVFWYNLLRSGEGDYRTRHAACPVLVGCKWVSNKWFHERGQEFLRPCGSTEVD

SEQ ID NO: 218 - protein, 314 aa, Homo sapiens
MSFLCSWLLFAMAWWLIAFAHGDLAPSEGTAEPCVTSIHSFSSAFLFSIEVQVTIGFGGRMVTEECPLAILILIVQNIVGLMINAIMLGCIFMKTAQAHRRAETLIFSKHAVIALRHGRLCFMLRVGDLRKSMIISATIHMQVVRKTTSPEGEVVPLHQVDIPMENGVGGNSIFLVAPLIIYHVIDANSPLYDLAPSDLHHHQDLEIIVILEGVVETTGITTQARTSYLADEILWGQRFVPIVAEEDGRYSVDYSKFGNTIKVPTPLCTARQLDEDHSLLEALTLASARGPLRKRSVPMAKAKPKFSISPDSLS

SEQ ID NO: 219 - protein, 97 aa, Homo sapiens
MALPLRPLTRGLASAAKGGHGGAGARTWRLLTFVLALPSVALCTFNSYLHSGHRPRPEFRPYQHLRIRTKPYPWGDGNHTLFHNSHVNPLPTGYEHP

SEQ ID NO: 220 - protein, 218 aa, Homo sapiens
MTQPVPRLSVPAALALGSAALGAAFATGLFLADPGAAAGGFYDDLRAGPALGQPGAAHPGQEGAGPGHLHGLLRPGPGPGAARGRARGDLRGGRAAPGAGTAPVEAEAEHKIDLRLKPALETLDELLAAGEAGTFDVAVVDADKENCSAYYERCLQLLRPGGILAVLRVLWRGKVLQPPKGDVAAECVRNLNERIRRDVRVYISLLPLGDGLTLAFKI

SEQ ID NO: 221 - protein, 83 aa, Homo sapiens [sequence omitted]

SEQ ID NO: 222 - protein, 672 aa, Homo sapiens; identical to SEQ ID NO: 214

SEQ ID NO: 223 - protein, 109 aa, Homo sapiens
MLSLPWAFLSVMFSFSCSFSDFSCLCCSQACPSVSTDTQCLVSGQLRGGGFKQNSDSLGWGIRNWGKLNDPEIPPRGVSGRICAWTVAEPFQCSFGSDFISLNKVPISL

SEQ ID NO: 224 - protein, 90 aa, Homo sapiens
  SITE (89): Xaa equals any of the naturally occurring L-amino acids
MLPQHRWWSMCPYLCACLGLASCLIPIIPALWEAEAGGSLEARSLRPTRTAWSPQEACRAQAPPATSEPQAQAREGSLQLQFPLPGMLXP

SEQ ID NO: 225 - protein, 331 aa, Homo sapiens
MSRYLLPLSALGTVAGAAVLLKDYVTGGACPSKATIPGKTVIVTGANTGIGKQTALELARRGGNIILACRDMEKCEAAAKDIRGETLNHHVNARHLDLASLKSIREFAAKIIEEEERVDILINNAGVMRCPHWTTEDGFEMQFGVNHLGHFLLTNLLLDKLKASAPSRIINLSSLAHVAGHIDFDDLNWQTRKYNTKAAYCQSKLAIVLFTKELSRRLQGSGVTVNALHPGVARTELGRHTGIHGSTFSSTTLGPIFWLLVKSPELAAQPSTYLAVAEELADVSGKYFDGLKQKAPAPEAEDEEVARRLWAESARLVGLEAPSVREQPLPR

SEQ ID NO: 226 - protein, 105 aa, Homo sapiens
MGWTMRLVTAALLLGLMMVVTGDEDENSPCAHEALLDEDTLFCQFRAPRLESRGPILRTPRIHQQAPSLRKRLMTLRLHARKMSFDFKPSSQKRSFVFIVTEDFC

SEQ ID NO: 227 - protein, 89 aa, Homo sapiens
MGAPWGQPSVAHHTLLFFFFFFEMESCSVAQAGVHLPDVSSLQPPPPGFKRFSCLSLLSSWDYRCAPTHPANFCICRRGGVSPCWPGWC

SEQ ID NO: 228 - protein, 205 aa, Homo sapiens
  SITE (113): Xaa equals any of the naturally occurring L-amino acids
MAPLALHLLVLVPILLSLVASQDWKAERSQDPFEKCMQDPDYEQLLKVVTWGLNRTLKPQRVIVVGAGVAGLVAAKVLSDAGHKVTILEADNRIGGRIFTYRDQNTGWIGELXHAHAQLSQDPPQALPGPGAQPDQVHPVRQEHVDGGARSEAAQLCGGEGAREAGLRLASPGKGPLARRHLPDGSQPGPQRPQGTGLQKGDEEV

SEQ ID NO: 229 - protein, 697 aa, Homo sapiens
MLLPLLLSSLLGGSQAMDGRFWIRVQESVMVPEGLCISVPCSFSYPRQDWTGSTPAYGYWFKAVTETTKGAPVATNHQSREVEMSTRGRFQLTGDPAKGNCSLVIRDAQMQDESQYFFRVERGSYVRYNFMNDGFFLKVTALTQKPDVYIPETLEPGQPVTVICVFNWAFEECPPPSFSWTGAALSSQGTKPTTSHFSVLSFTPRPQDHNTDLTCHVDFSRKGVSAQRTVRLRVAYAPRDLVISISRDNTPALEPQPQGNVPYLEAQKGQFLRLLCAADSQPPATLSWVLQNRVLSSSHPWGPRPLGLELPGVKAGDSGRYTCRAENRLGSQQRALDLSVQYPPENLRVMVSQANRTVLENLGNGTSLPVLEGQSLCLVCVTHSSPPARLSWTQRGQVLSPSQPSDPGVLELPRVQVEHEGEFTCHARHPLGSQHVSLSLSVHYSPKLLGPSCSWEAEGLHCSCSSQASPAPSLRWWLGEELLEGNSSQDSFEVTPSSAGPWANSSLSLHGGLSSGLRLRCEAWNVHGAQSGSILQLPDKKGLISTAFSNGAFLGIGITALLFLCLALIIMKILPKRRTQTETPRPRFSRHSTILDYINVVPTAGPLAQKRNQKATPNSPRTPLPPGAPSPESKKNQKKQYQLPSFPEPKSSTQAPESQESQEELHYATLNFPGVRPRPEARMPKGTQADYAEVKFQ

SEQ ID NO: 230 - protein, 146 aa, Homo sapiens
MTMRSLLRTPFLCGLLWAFCAPGARAEEPAASFSQPGSMGLDKNTVHDQEHIMEHLEGVINKPEAEMSPQELQLHYFKMHDYDGNNLLDGLELSTAITHVHKEEGSEQAPLMSEDELINIIDGVLRDDDKNNDGYIDYAEFAKSLQ

SEQ ID NO: 231 - protein, 110 aa, Homo sapiens
MASPASVVPAVGFLRLHSMLLIACPPHASLGLPLHVRQQPVELRHLPFPCCSSLSPLSSWAYRVLPFCPCWSTVAQSRLTAASTSQTQVVLPPQPHPRPPQPPKVLALQT

SEQ ID NO: 232 - protein, 168 aa, Homo sapiens
MEDGDKRCKLLLGIGILVLLIIVILGVPLIIFTIKANSEACRDGLRAVMECRNVTHLLQQELTEAQKGFQDVEAQAATCNHTVMALMASLDAEKAQGQKKVEELEGEITTLNHKLQDASAEVERLRRENQVLSVRIADKKYYPSSQDSSSAAAPQLLIVLLGLSALLQ

SEQ ID NO: 233 - protein, 186 aa, Homo sapiens
MAGVGAGPLRAMGRQALLLLALCATGAQGLYFHIGETEKRCFIEEIPDETMVIGNYRTQMWDKQKEVFLPSTPGLGMHVEVKDPDGKVVLSRQYGSEGRFTFTSHTPGDHQICLHSNSTRMALFAGGKLRVHLDIQVGEHANNYPEIAAKDKLTELQLRARQLLDQVEQIQKEQDYQRASAYLLVI

SEQ ID NO: 234 - protein, 146 aa, Homo sapiens
MLTVALLALLCASASGNAIQARSSSYSGEYGSGGGKRFSHSGNQLDGPITALRVRVNTYYIVGLQVRYGKVWSDYLGGRNGDLEEIFLHPGESVIQVSGKYKWYLKKLVFVTDKGRYLSFGKDSGTSFNAVPLHPNTVLRFKKKKK

SEQ ID NO: 235 - protein, 93 aa, Homo sapiens
MARLQTALLVVLVLLAVALQATEAGPYGANMEDSVCCRDYVRYRLPLRVVKHFYWTSDSCPRPGVVLLTFRDKEICADPRVPWVKMILNKLSQ

SEQ ID NO: 236 - protein, 491 aa, Homo sapiens
MDPFVVLVLCLSFLLLLSLWRQRSARGNLPPGPTPLPIIGNYHLIDMKDIGQCLTNFSKIYGPVFTLYFGSQPIVILHGYEAMKEAFIDYGEEFSGRGRIPVFDKVSKGKGIGFSHGNVWKATRVFTVNTLRNLGMGKRTIETKVQEEAQWLMKELKKTNGSPCDPQFIIGCAPCNVICSIVFQNRFDYKDKDFLSLIGKVNECTEILSSPECQIFNAVPILIDYCPGSHNKFLKNHTWIKSYLLEKIKEHEESLDVTNPRDFVDYFLIQRCQKNGIEHMDYTIEHLATLVTDLVFGGTEPLSSTMRFALLLLMKHTHITAKVQEEIDNVIGRHRSPCMQDRNHMPYTNAMVHEVQRYIDLGPNGVVHEVTCDTKFRNYFIPKGTQVMTSLTSVLHDSTEFPNPEVFDPGHFLDDNGNFKKSDYFVPFSAGKRICVGESLARMELFLFLTTILQNFKLKPLVDPKDIDMTPKHSGFSKIPPNFQMCFIPVE

SEQ ID NO: 237 - protein, 114 aa, Homo sapiens
  SITE (29): Xaa equals any of the naturally occurring L-amino acids
  SITE (30): Xaa equals any of the naturally occurring L-amino acids
  SITE (90): Xaa equals any of the naturally occurring L-amino acids
MPVGLEAMLGIESGWLSLLPELLFVLSLXXCRDSASSAGCHLLFFFSSEMGSRYVVQGGLKLLTSHLGLPGCWDCRHEPPYLASVSLLIXELWLGAAARVCCPSALGGQGGRIT

SEQ ID NO: 238 - protein, 88 aa, Homo sapiens
MVFFLLLLFLREGLALSPRLECSSTIIAHYSLKFLDSSAPPISASPVAGTTACTTIPGYLFYFFVEMRSPCVAQAGLKHLDSRDPPAS

SEQ ID NO: 239 - protein, 498 aa, Homo sapiens
MMGSPVSHLLAGFCVWVVLGWVGGSVPNLGPAEQEQNHYLAQLFGLYGENGTLTAGGLARLLHSLGLGRVQGLRLGQHGPLTGRAASPAADNSTHRPQNPELSVDVWAGMPLGPSGWGDLEESKAPHLPRGPAPSGLDLLHRLLLLDHSLADHLNEDCLNGSQLLVNFGLSPAAPLTPRQFALLCPALLYQIDSRVCIGAPAPAPPGDLLSALLQSALAVLLLSLPSPLSLLLLRLLGPRLLRPLLGFLGALAVGTLCGDALLHLLPHAQEGRHAGPGGLPEKDLGPGLSVLGGLFLLFVLENMLGLLRHRGLRPRCCRRKRRNLETRNLDPENGSGMALQPLQAAPEPGAQGQREKNSQHPPALAPPGHQGHSHGHQGGTDITWMVLLGDGLHNLTDGLAIGAAFSDGFSSGLSTTLAVFCHELPHELGDFAMLLQSGLSFRRLLLLSLVSGALGLGGAVLGVGLSLGPVPLTPWVFGVTAGVFLYVALVDMVRDVG

SEQ ID NO: 240 - protein, 205 aa, Homo sapiens
MCDGSHLASTLRYCMTVSGTVVLVAGTLCFAWWSEGDATAQPGQLAPPTEYPVPEGPSPLLRSVSFVCCGAGGLLLLIGLLWSVKASIPGPPRWDPYHLSRDLYYLTVESSEKESCRTPKVVDIPTYEEAVSFPVAEGPPTPPAYPTEEALEPSGSRDALLSTQPAWPPPSYESISLALDAVSAETTPSATRSCSGLVQTARGGS

SEQ ID NO: 241 - protein, 197 aa, Homo sapiens
LTGRGHARASVRFPSLSLPILTTEATTKHSSSSDSTLSASQPLPDLSFPLLPSLLQGCPRQGFQPGLGVIFSPGANPSLSCYKKIPWKYWGPGSPDSRNCPCSEQPEFAGPQGRREETCSELFLCQETLDLGPSISQAKHPLVCVWEGMAKAARVLTPQDHSPALSSGGTALQGVLAVGPAQLQAEQGGPEITDPLL

SEQ ID NO: 242 - protein, 167 aa, Homo sapiens
MLTVALLALLCASASGNAIQARSSSYSGEYGSGGGKRFSHSGNQLDGPITALRVRVNTYYIVGLQVRYGKVWSDYVGGRNGDLEEIFLHPGESVIQVSGKYKWYLKKLVFVTDKGRYLSFGKDSGTSFNAVPLHPNTVLRFISGRSGSLIDAIGLHWDVYPTSCSRC

SEQ ID NO: 243 - protein, 88 aa, Homo sapiens [sequence omitted]

SEQ ID NO: 244 - protein, 30 aa, Homo sapiens
FFFFFSRSAQSLLAISAQKSPFLNRTVPLT

SEQ ID NO: 245 - protein, 533 aa, Homo sapiens
MKLWVSALLMAWFGVLSCVQAEFFTSIGHMTDLIYAEKELVQSLKEYILVEEAKLSKIKSWANKMEALTSKSAADAEGYLAHPVNAYKLVKRLNTDWPALEDLVLQDSAAGFIANLSVQRQFFPTDEDEIGAAKALMRLQDTYRLDPGTISRGELPGTKYQAMLSVDDCFGMGRSAYNEGDYYHTVLWMEQVLKQLDAGEEATTTKSQVLDYLSYAVFQLGDLHRALELTRRLLSLDPSHERAGGNLRYFEQLLEEEREKTLTNQTEAELATPEGIYERPVDYLPERDVYESLCRGEGVKLTPRRQKRLFCRYHHGNRAPQLLIAPFKEEDEWDSPHIVRYYDVMSDEEIERIKEIAKPKLARATVRDPKTGVLTVASYRVSKSSWLEEDDDPVVARVNRRMQHITGLTVKTAELLQVANYGVGGQYEPHFDFSRRPFDSGLKTEGNRLATFLNYMSDVEAGGATVFPDLGAAIWPKKGTAVFWYNLLRSGEGDYRTRHAACPVLVGCKWVSNKWFHERGQEFLRPCGSTEVD

SEQ ID NO: 246 - protein, 245 aa, Homo sapiens
MDVGPSSLPHLGLKLLLLLLLLPLRGQANTGCYGIPGMPGLPGAPGKDGYDGLPGPKGEPGIPAIPGIRGPKGQKGEPGLPGHPGKNGPMGPPGMPGVPGPMGIPGEPGEEGRYKQKFQSVFTVTRQTHQPPAPNSLIRFNAVLTNPQGDYDTSTGKFTCKVPGLYYFVYHASHTANLCVLLYRSGVKVVTFCGHTSKTNQVNSGGVLLRLQVGEEVWLAVNDYYDMVGIQGSDSVFSGFLLFPD

SEQ ID NO: 247 - protein, 307 aa, Homo sapiens
MRRGRAGPGRAGGARSASWMSRLRALLGLGLLVAGSRLPRIKSQTIACRSGPTWWGPQRLNSGGRWDSEVMASTVVKYLSQEEAQAVDQELFNEYQFSVDQLMELAGLSCATAIAKAYPPTSMSRSPPTVLVICGPGNNGGDGLVCARHLKLFGYEPTIYYPKRPNKPLFTALVTQCQKMDIPFLGEMPAEPMTIDELYELVVDAIFGFSFKGDVREPFHSILSVLKGLTVPIASIDIPSGWDVEKGNAGGIQPDLLISLTAPKKSATQFTGRYHYLGGRFVPPALEKKYQLNLPPYPDTECVYRLQ

SEQ ID NO: 248 - protein, 42 aa, Homo sapiens
GSFVGGIVLTLGVLSILYIGCKMYYSRRGIRYRTIDEHDAII

SEQ ID NO: 249 - protein, 227 aa, Homo sapiens
MWRVPGTTRRPVTGESPGMHRPEAMLLLLTLALLGGPTWAGKMYGPGGGKYFSTTEDYDHEITGLRVSVGLLLVKSVQVKLGDSWDVKLGALGGNTQEVTLQPGEYITKVFVAFQAFLRGMVMYTSKDRYFYFGKLDGQISSAYPSQEGQVLVGIYGQYQLLGIKSIGFEWNYPLEEPTTEPPINKASAEKKKKKKKKKKKKKKKKKKKKKKKKKKKKKKKKKKKKK

SEQ ID NO: 250 - protein, 85 aa, Homo sapiens
MKIPVLPAVVLLSLLVLHSAQGATLGGPEEESTIENYASRPEAFKADEFLNWHALFESIKRKLPFLNWDAFPKLKGLRSATPDAQ

SEQ ID NO: 251 - protein, 334 aa, Homo sapiens
MNLLLLLAVLCLGTALATPKFDQTFSAEWHQWKSTHRRLYGTNEEEWRRAIWEKNMRMIQLHNGEYSNGQHGFSMEMNAFGDMTNEEFRQVVNGYRHQKHKKGRLFQEPLMLKIPKSVDWREKGCVTPVKNQGQCGSCWAFSASGCLEGQMFLKTGKLISLSEQNLVDCSHAQGNQGCNGGLMDFAFQYIKENGGLDSEESYPYEAKDGSCKYRAEFAVANDTGFVDIPQQEKALMKAVATVGPISVAMDASHPSLQFYSSGIYYEPNCSSKNLDHGVLLVGYGYEGTDSNKNKYWLVKNSWGSEWGMEGYIKIAKDRDNHCGLATAASYPVVN

SEQ ID NO: 252 - protein, 96 aa, Homo sapiens
MIVGSPRALTQPLGLLRLLQLVSTCVAFSLVASVGAGRGHGHWSMFTWCFCFSVTLIILIVELCGLQARFPLSWRNFPITFACYAALFCLSASIIY

SEQ ID NO: 253 - protein, 82 aa, Homo sapiens [sequence omitted]

SEQ ID NO: 254 - protein, 217 aa, Homo sapiens
MRMKYLWTSHMCVFASFGLCSPEIWELLLKSVHLYNPKRFWPGMMDELSELREFYDPDTVELMNWINSNTPRKAVFAGSMQLLAGVKLCTGRTLTNHPHYEDSSLRERTRAVYQIYAKRAPEEVHALLRSFGTDYVILEDSICYERRHRRGCRLRDLLDIANGHMMDGPGENDPDLKPADHPRFCEEIKRNLPPYVAYFTRVFQNKTFHVYKLSRNK

SEQ ID NO: 255 - protein, 107 aa, Homo sapiens [sequence omitted]

SEQ ID NO: 256 - protein, 146 aa, Homo sapiens
MIISTIGEIALNPLNILGINFLGRRLSLSITMGCTALFCLLLNICTSSAGLIGFLFMLRALVAANFNTVYIYTAEVYPTTMRALGMGTSGSLCRIGAMVAPFISQVLMSASILGALCLFSSVCVVCAISAFTLPIETKGRALQQIK

SEQ ID NO: 257 - protein, 205 aa, Homo sapiens
MAVVFSTLVCLSRLYTGMHTVLDVLGGVLITALLIVLTYPAWTFIDCLDSASPLFPVCVIVVPFFLCYNYPVSDYYSPTRADTTTILAAGAGVTIGFWINHFFQLVSKPAESLPVIQNIPPLTTYMLVLGLTKFAVGIVLILLVRQLVQNLSLQVLYSWFKVVTRNKEARRRLEIEVPYKFVTYTSVGICATTFVPMLHRFLGLP

SEQ ID NO: 258 - protein, 153 aa, Homo sapiens
  SITE (20): Xaa equals any of the naturally occurring L-amino acids
  SITE (21): Xaa equals any of the naturally occurring L-amino acids
  SITE (26): Xaa equals any of the naturally occurring L-amino acids
  SITE (114): Xaa equals any of the naturally occurring L-amino acids
MLPRGRPRALGAAALLLLLXXLGFLXFGGDLGCERREPGGRAGAPGCFPGPLMPRVPPDGRLRRAAALDGDPGAGPGDHNRSDCGPQPPPPPKCEVGARGPGGGSPGGAAPEPXLLDICGNHSTWRLSSTGQPAGAHLERAAPLLPTSFPHLK

SEQ ID NO: 259 - protein, 99 aa, Homo sapiens
MILWRRRHTLVFRLFSFFALVSPHLCDFIYLWSLMMVTYRWGFGVDILFVDVDAIPFCLLVFLLTVRSLSGRSVGVAGGPLPTLFAWVSPVEAAEQQIL

SEQ ID NO: 260 - protein, 171 aa, Homo sapiens
MAWWPNSTCWLLTAVTMALATRCVPQELPSGSEVPGLEAVQVVRSGLAGPHRCSCRHPVLALTGGRDTQGPGASGPVLQWPPLLSQRVQAWLLKAMCLRLTLKRACQAAPGGSSHGGRCPAVCWPPGGRDGRGAAGSGQGHGRWPGLGTSLQVASTLRPELRPTRTGDAGD

SEQ ID NO: 261 - protein, 82 aa, Homo sapiens
MGFSPCIFWGRGLFSATSWGLLPFAVPITTVVGRPIPVPQRLHPTEEEVNHYHALYMTALEQLFEEHKESCGVPASTCLTFI

SEQ ID NO: 262 - protein, 103 aa, Homo sapiens
MTLWNGVLPFYPQPRHAAGFSVPLLIVILVFLALAASFLLILPGIRGHSEYLHSHLLPSEIRLGPPSSEGGDPCVPSTSGLTEPHQAVTGPGGRTRTRRQTAR

SEQ ID NO: 263 - protein, 100 aa, Homo sapiens
MTRAPLLLLCVALVLLGHVNGATVRNEDKWKPLNNPRNRDLFFRRLQAYFKGRGLDLGTFPNPFPTNENPRPLSFQSELTASASADYEEQKNSFHNYLKG

SEQ ID NO: 264 - protein, 151 aa, Homo sapiens
MRRLLLVTSLVVVLLWEAGAVPAPKVPIKMQVKHWPSEQDPEKAWGARVVEPPEKDDQLVVLFPVQKPKLLTTEEKPRGQGRGPILPGTKAWMETEDTLGRVLSPEPDHDSLYHPPPEEDQGEERPRLWVMPNHQVLLGPEEDQDHIYHPQ

SEQ ID NO: 265 - protein, 142 aa, Homo sapiens [sequence omitted]

SEQ ID NO: 266 - protein, 450 aa, Homo sapiens
MLVTAYLAFVGLLASCLGLELSRCRAKPPGRACSNPSFLRFQLDFYQVYFLALAADWLQAPYLYKLYQHYYFLEGQIAILYVCGLASTVLFGLVASSLVDWLGRKNSCVLFSLTYSLCCLTKLSQDYFVLLVGRALGGLSTALLFSAFEAWYIHEHVERHDFPAEWIPATFARAAFWNHVLAVVAGVAAEAVASWIGLGPVAPFVAAIPLLALAGALALRNWGENYDRQRAFSRTCAGGLRCLLSDRRVLLLGTIQALFESVIFIFVFLWTPVLDPHGAPLGIIFSSFMAASLLGSSLYRIATSKRYHLQPMHLLSLAVLIVVFSLFMLTFSTSPGQESPVESFIAFLLIELACGLYFPSMSFLRRKVIPETEQAGVLNWFRVPLHSLACLGLLVLHDSDRKTGTRNMFSICSAVMVMALLAVVGLFTVVRHDAELRVPSPTEEPYAPEL

SEQ ID NO: 267 - protein, 266 aa, Homo sapiens
MWWFQQGLSFLPSALVIWTSAAFIFSYITAVTLHHIDPALPYISDTGTVAPEKCLFGAMLNIAAVLCIATIYVRYKQVHALSPEENVIIKLNKAGLVLGILSCLGLSIVANFQKTTLFAAHVSGAVLTFGMGSLYMFVQTILSYQMQPKIHGKQVFWIRLLLVIWCGVSALSMLTCSSVLHSGNFGTDLEQKLHWNPEDKGYVLHMITTAAEWSMSFSFFGFFLTYIRDFQKISLRVEANLHGLTLYDTAPCPINNERTRLLSRDI

SEQ ID NO: 268 - protein, 146 aa, Homo sapiens
LPAQGISGLAGLRGLAPVELWVPVFSVFFAALLWLAAAVLQACVGHSDEGCGASQCRRAALGIVPSPVSVLRTYPGLHHQDPVFGFRRPSMGKTRHQPLQQWVPLACGHQLGDPGSGPLLSPVSLCCGFWAVMSPPLKDVFTLTSG

SEQ ID NO: 269 - protein, 263 aa, Homo sapiens [sequence omitted]

SEQ ID NO: 270 - protein, 950 aa, Homo sapiens
  SITE (153): Xaa equals any of the naturally occurring L-amino acids
  SITE (176): Xaa equals any of the naturally occurring L-amino acids
  SITE (278): Xaa equals any of the naturally occurring L-amino acids
MTWRMGPRFTMLLAMWLVCGSEPHPHATIRGSHGGRKVPLVSPDSSRPARFLRHTGRSRGIERSTLEEPNLQPLQRRRSVPVLRLARPTEPPARSDINGAAVRPEQRPAARGSPREMIRDEGSSARSRMLRFPSGSSSPNILASFAGKNRVWXISAPHASEGYYRLMMSLLKDDVXCELAERHIQQIVLFHQAGEEGGKVRRITSEGQILEQPLDPSLIPKLMSFLKLEKGKFGMVLLKKTLQVEERYPYPVRLEAMYEVIDQGPIRRIEKIRQKGFXQKCKASGVEGQVVAEGNDGGGGAGRPSLGSEKKKEDPRRAQVPPTRESRVKVLRKLAATAPALPQPPSTPRATTLPPAPATTVTRSTSRAVTVAARPMTTTAFPTTQRPWTPSPSHRPPTTTEVITARRPSVSENLYPPSRKDQHRERPQTTRRPSKATSLESFTNAPPTTISEPSTRAAGPGRFRDNRMDRREHGHRDPNVVPGPPKPAKEKPPKKKAQDKILSNEYEEKYDLSRPTASQLEDELQVGNVPLKKAKESKKHEKLEKPEKEKKKKMKNENADKLLKSEKQMKKSEKKSKQEKEKSKKKKGGKTEQDGYQKPTNKHFTQSPKKSVADLLGSFEGKRRLLLITAPKAENNMYVQQRDEYLESFCKMATRKISVITIFGPVNNSTMKIDHFQLDNEKPMRVVDDEDLVDQRLISELRKEYGMTYNDFFMVLTDVDLRVKQYYEVPITMKSVFDLIDTFQSRIKDMEKQKKEGIVCKEDKKQSLENFLSRFRWRRRLLVISAPNDEDWAYSQQLSALSGQACNFGLRHITILKLLGVGEEVGGVLELFPINGSSVVEREDVPAHLVKDIRNYFQVSPEYFSMLLVGKDGNVKSWYPSPMWSMVIVYDLIDSMQLRRQEMAIQQSLGMRCPEDEYAGYGYHSYHQGYQDGYQDDYRHHESYHHGYPY

SEQ ID NO: 271 - protein, 127 aa, Homo sapiens
  SITE (114): Xaa equals any of the naturally occurring L-amino acids
MCVHVLHVCACVCMCCTCVCAHVCVDMCSCFVLWSGCFLCLPQILVEILTPQAMMLGGGASGRWQVREAAALLGDQCPSTSGSREVPCPFHHVRTRDGAVYEPGSESSPDVEQXGALILNLQPPAAV

SEQ ID NO: 272 - protein, 94 aa, Homo sapiens
MAISSVASFLLLVYSFTHSLMPCRAIISSHIHLFVHQSPAPGSFGAHQAGLASQPPELPAQASRHLAAASSPLSTPYLFVQPRPWGLWGRHKYP

SEQ ID NO: 273 - protein, 312 aa, Homo sapiens
  SITE (290): Xaa equals any of the naturally occurring L-amino acids
  SITE (292): Xaa equals any of the naturally occurring L-amino acids
  SITE (293): Xaa equals any of the naturally occurring L-amino acids
MRVKRLLKAGVISALACMVKADSAILTDQTKELLARVFLALCDNPKDRGTIVAQGGGKALIPLALEGTDVGKVKAAHALAKIAAVSNPDIAFPGERVYEVVRPLVRLLDTQRDGLQNYEALLGLTNLSGRSDKLRQKIFKERALPDIENYMFENHDQLRQAATECMCNMVLHKEVQERFLADGNDRLKLVVLLCGEDDDKVQNAAAGALAMLTAAHKKLCLKMTQVTTQWLEILQRLCLHDQLSVQHRGLVIAYNLLAADAELAKKLVESELLEILTVVGKQEPDEKKAXVXXTARECLIKCMDYGFIKPVS

SEQ ID NO: 274 - protein, 237 aa, Homo sapiens
MGRCCFYTAGTLSLLLLVTSVTLLVARVFQKAVDQSIEKKIVLRNGTEAFDSWEKPPLPVYTQFYFFNVTNPEEILRGETPRVEEVGPYTYRELRNKANIQFGDNGTTISAVSNKAYVFERDQSVGDPKIDLIRTLNIPVLTVIEWSQVHFLREIIEAMLKAYQQKLFVTHTVDELLWGYKDEILSLIHVFRPDISPYFGLFYEKNGTNDGDYVFLTGEDSYLNFTKIVEWNGKTCT

SEQ ID NO: 275 - protein, 104 aa, Homo sapiens
MPAHLGRMGIVRLGLLCLKVSVLFVCLVSCHSSCMIWGCRKDLHLTPALMTQIVTVFQGRTSFLQGMVVGGSRSQTPVWARLQSRVGAVRGWPGGRCITGALCC

SEQ ID NO: 276 - protein, 82 aa, Homo sapiens
MHTFTLFSVNPVLLWVFFFLLSFFFFFFKRHSLALLPRLECSGVISAHCILCLLGSSESCASASQVGGIMGMCRHTWLIFVF

SEQ ID NO: 277 - protein, 181 aa, Homo sapiens
  SITE (32): Xaa equals any of the naturally occurring L-amino acids
  SITE (33): Xaa equals any of the naturally occurring L-amino acids
  SITE (87): Xaa equals any of the naturally occurring L-amino acids
  SITE (92): Xaa equals any of the naturally occurring L-amino acids
  SITE (97): Xaa equals any of the naturally occurring L-amino acids
  SITE (103): Xaa equals any of the naturally occurring L-amino acids
  SITE (125): Xaa equals any of the naturally occurring L-amino acids
  SITE (131): Xaa equals any of the naturally occurring L-amino acids
  SITE (137): Xaa equals any of the naturally occurring L-amino acids
  SITE (174): Xaa equals any of the naturally occurring L-amino acids
MQMLTFLLCFGFPFSTAFYFHAGEREEKCLIXXIPSDTLVTGTFKIQQWDIGRHTFLESAPGLGMFVTITTYNDERIHLDIRVGEHXLDAAXAQAKXKVNELXFKLEHLIEQIEQIVKEQNYQRXREENFXTTSEDXNSNVLWWAFAQILIFISVGIFQMKYLKDFFIAKKIVXNIINKDK

SEQ ID NO: 278 - protein, 90 aa, Homo sapiens
MMAQKRKGKMVKLYVLGSVLALFGVVLGLMETVCSPFTAARRLRDQEAAVAELQAALERQALQKQALQEKGKQQDTVLGGRALSNRQHAS

SEQ ID NO: 279 - protein, 217 aa, Homo sapiens
  SITE (51): Xaa equals any of the naturally occurring L-amino acids
  SITE (106): Xaa equals any of the naturally occurring L-amino acids
  SITE (129): Xaa equals any of the naturally occurring L-amino acids
  SITE (165): Xaa equals any of the naturally occurring L-amino acids
  SITE (199): Xaa equals any of the naturally occurring L-amino acids
MAGLNVSLSFFFATFTLCEAARRASKALLPVGAYEVFAREAVGAVQLGACXLEMRTLVELGPWAGDFGPDLLLTLLFLLFLAHGVTLDGASANPTVSLQEFLMAEXSLPGTLLKLAAQGLGMQAACTLXRLCWAWELSDLHLLQSLMAQSCSSALRTSVPHGALXEAACTFCFHLTLLHLRHSPPAYSGPAVALLVTVXAYTAGPYVCFFNPALAAL

SEQ ID NO: 280 - protein, 89 aa, Homo sapiens
MNAKVVVVLVLVLTALCLSDGKPVSLSYRCPCRFFESHVARANVKHLKILNTPNCALQIVARLKNNNRQVCIDPKLKWIQEYLEKALNK

SEQ ID NO: 281 - protein, 233 aa, Homo sapiens
MTFVTLFFACLGFLSPANRGALMTCAVVLWVLLGTPAGYVAARFYKSFGGEKWKTNVLLTSFLCPGIVFADFFIMNLILWGEGSSAAIPFGTLVAILALWFCISVPLTFIGAYFGFKKNAIEHPVRTNQIPRQIPEQSFYTKPLPGIIMGGILPFGCIFIQLFFILNSIWSHQMYYMFGFLFLVFIILVITCSEATILLCYFHLCAEDYHWQWRSFLTRGFTAVYFLSMQYTT

SEQ ID NO: 282 - protein, 150 aa, Homo sapiens
  SITE (89): Xaa equals any of the naturally occurring L-amino acids
MVLCFPLLLLLLVLWGPVCPLHAWPKRLTKAHWFEIQHIQPSPLQCNRAMSGINNYTQHCKHQNTFLHDSFQNVAAVCDLLSIVCKNRXHNCHQSSKPVNMTDCRLTSGKYPQCRYSAAAQYKFFIVACDPPQKSDPPYKLVPVHLDSIL

SEQ ID NO: 283 - protein, 205 aa, Homo sapiens
  SITE (159): Xaa equals any of the naturally occurring L-amino acids
MEFLWAPLLGLCCSLAAADRHTVFWNSSNPKFRNEDYTIHVQLNDYVDIICPHYEDHSVADAAMEQYILYLVEHEEYQLCQPQSKDQVRWQCNRPSAKHGPEKLSEKFQRFTPFTLGKEFKEGHSYYYISKPIHQHEDRCLRLKVTVSGKITHSPQAHXNPQEKRLAADDPEVRVLHSIGHSAAPRLFPLAWTVLLLPLLLLQTP

SEQ ID NO: 284 - protein, 86 aa, Homo sapiens
MIPAVVLLLLLLVEQAAALGEPQLCYILDAILFLYGIVLTLLYCRLKIQVRKAAITSYEKSDGVYTGLSTRNQETYETLKHEKPPQ

SEQ ID NO: 285 - protein, 245 aa, Homo sapiens; identical to SEQ ID NO: 246

SEQ ID NO: 286 - protein, 112 aa, Homo sapiens
MEKILILLLVALSVAYAAPGPRGIIINLENGELCMNSAQCKSNCCQHSSALGLARCTSMASENSECSVKTLYGIYYKCPCERGLTCEGDKTIVGSITNTNFGICHDAGRSKQ

SEQ ID NO: 287 - protein, 106 aa, Homo sapiens
  SITE (99): Xaa equals any of the naturally occurring L-amino acids
MIFTFTFPFSLLFCLTCTVATEMHFRNRRFRPAPSAALVPVALDFPGPFPVGGPCRPHQGGVGVTWQKGPRSGDVVPRIWNLSHPSCSWTEFFPFIRRXPLAVSSR

SEQ ID NO: 288 - protein, 63 aa, Homo sapiens
MTEATFDTLRLWLIILLCALRLAMMRSHLQAYLNLAQKCVDQMKKEAGRISTVELQKMVSFIP

SEQ ID NO: 289 - protein, 114 aa, Homo sapiens
  SITE (113): Xaa equals any of the naturally occurring L-amino acids
MAILVKSSHVCFMVILGLLFLRNCQIVFQSGNTIPLYHHKSNSGSVSPHPCQHLKLSLFCIFSIAYYLFIYLIYLFILRQSLGDRERLHLKKKKKKKKQSLSFSSSHYFCTGXH

SEQ ID NO: 290 - protein, 123 aa, Homo sapiens
  SITE (55): Xaa equals any of the naturally occurring L-amino acids
  SITE (101): Xaa equals any of the naturally occurring L-amino acids
MSFETLLAGVPAAALSWAVPGLSPSWFTLGPGSPWVLVHPGSWSCSPSLLGSWCXTEGLLLRCLQAAVATCPRCPTSDLLLGGRAVSSWQRTLLCCPGPSXASRVTWPLAGALRGRATEAPEP

SEQ ID NO: 291 - protein, 185 aa, Homo sapiens
MMMVRRGLLAWISRVVVLLVLLCCAISVLYMLACTPKGDEEQLALPRANSPTGKEGYQAVLQEWEEQHRNYVSSLKRQIAQLKEELQERSEQLRNGQYQASDAAGLGLDRSPPEKTQADLLAFLHSQVDKAEVNAGVKLATEYAAVPFDSFTLQKVYQLETGLTRHPEEKPVRKDKRDELVEAIE

SEQ ID NO: 292 - protein, 81 aa, Homo sapiens
MGLVWHHKPRLLGTVPLLCRAVCLWGSLLLSCFWDGPTLPSREAPRGAGEQGWQRQLWAGRALCRTCAAPGVAGTVWLLSA

SEQ ID NO: 293 - protein, 88 aa, Homo sapiens; identical to SEQ ID NO: 204

SEQ ID NO: 294 - protein, 210 aa, Homo sapiens; identical to SEQ ID NO: 205

SEQ ID NO: 295 - protein, 365 aa, Homo sapiens
MRQTLPLLLLTVLRPSWADPPQEKVPLFRVTQQGPWGSSGSNATDSPCEGLPAADATALTLANRNLERLPGCLPRTLRSLDASHNLLRALSTSELGHLEQLQVLTLRHNRIAALRWGPGGPAGLHTLDLSYNQLAALPPCAGPALSSFRALALAGNPLRALQPRAFACFPALQLLNLSCTALGRGAQGGIAEAAFAGEDGAPLVTLEVLDLSGTFLERVESGWIRDLPKLTSLYLRKMPRLTTLEGDIFKMTPNLQQLDCQDSPALASVATHIFQDTPHLQVLLFQNCNLSSFPPWTLDSSQVLSINLFGNPLTCSCDLSWLLTDAKRTVLSRSFQRKLLHGQALRHNELCYSRNQFQWISSSNS

SEQ ID NO: 296 - protein, 99 aa, Homo sapiens
LVLAPHGCKENCPKQVFPAEAPSWSSSKTQRALLFKKSIPVDFQFQFLRTRKDFILQKDSSSRRTHPPKDFSRRGKWKTRVTCSGLITELCLSLTSFEL

SEQ ID NO: 297 - protein, 196 aa, Homo sapiens; identical to SEQ ID NO: 207

SEQ ID NO: 298 - protein, 196 aa, Homo sapiens; identical to SEQ ID NO: 207

SEQ ID NO: 299 - protein, 84 aa, Homo sapiens; identical to SEQ ID NO: 208

SEQ ID NO: 300 - protein, 84 aa, Homo sapiens; identical to SEQ ID NO: 208

SEQ ID NO: 301 - protein, 84 aa, Homo sapiens; identical to SEQ ID NO: 208

SEQ ID NO: 302 - protein, 47 aa, Homo sapiens
  SITE (21): Xaa equals any of the naturally occurring L-amino acids
LFQFCEILFFFWILAFFPPPXPQKITPLGPKKKKKKKKKKKKKKKKK

SEQ ID NO: 303 - protein, 400 aa, Homo sapiens; identical to SEQ ID NO: 209

SEQ ID NO: 304 - protein, 400 aa, Homo sapiens; identical to SEQ ID NO: 209

SEQ ID NO: 305 - protein, 125 aa, Homo sapiens; identical to SEQ ID NO: 210

SEQ ID NO: 306 - protein, 125 aa, Homo sapiens; identical to SEQ ID NO: 210

SEQ ID NO: 307 - protein, 65 aa, Homo sapiens
PLFRMVSSPSLCLANSSSSFSSPLILNVFREASLDLLVRSHFLVIYSFIALSLGATSPSLVWLLE

SEQ ID NO: 308 - protein, 294 aa, Homo sapiens
MRPRAPACAAAALGLCSLLLLLAPGHACPAGCACTDPHTVDCRDRGLPSVPDPFPLDVRKLLVAGNRIQRIPEDFFIFYGDLVYLDFRNNSLRSLEEGTFSGSAKLVFLDLSYNNLTQLGAGAFRSAGRLVKLSLANNNLVGVHEDAFETLESLQVLELNDNNLRSLSVAALAALPALRSLRLDGNPWLCDCDFAHLFSWIQENASKLPKGLDEIQCSLPMESRRISLRELSEASFSECRFSLSLTDLCIIIFSGVAVSIAAIISSFFLATVVQCLQRCAPNKDAEDEDEDEDD

SEQ ID NO: 309 - protein, 283 aa, Homo sapiens; identical to SEQ ID NO: 212

SEQ ID NO: 310 - protein, 672 aa, Homo sapiens; identical to SEQ ID NO: 214

SEQ ID NO: 311 - protein, 10 aa, Homo sapiens
WLSFLAISGW

SEQ ID NO: 312 - protein, 160 aa, Homo sapiens; identical to SEQ ID NO: 215

SEQ ID NO: 313 - protein, 160 aa, Homo sapiens; identical to SEQ ID NO: 215

SEQ ID NO: 314 - protein, 215 aa, Homo sapiens; identical to SEQ ID NO: 216

SEQ ID NO: 315 - protein, 215 aa, Homo sapiens; identical to SEQ ID NO: 216

SEQ ID NO: 316 - protein, 215 aa, Homo sapiens; identical to SEQ ID NO: 216

SEQ ID NO: 317 - protein, 138 aa, Homo sapiens
  SITE (88): Xaa equals any of the naturally occurring L-amino acids
  SITE (116): Xaa equals any of the naturally occurring L-amino acids
  SITE (118): Xaa equals any of the naturally occurring L-amino acids
  SITE (119): Xaa equals any of the naturally occurring L-amino acids
  SITE (129): Xaa equals any of the naturally occurring L-amino acids
MKLWVSALLMAWFGVLSCVQAEFFTSIGHMTDLIYAEKELVQSLKEYILVEEAKLSKIKSWANKMEALTSKSAADAEGYLAHPVNAYXLVKRLNTDWPALEDLACRTQLQVLSPTXLXXGKFFPTDEGXDRSWPKPLM

SEQ ID NO: 318 - protein, 56 aa, Homo sapiens
  SITE (13): Xaa equals any of the naturally occurring L-amino acids
NFFPFFPFFFFGXFFFLGFPQKKISPPQKKKKKKKKKKKKKKKKKKKKKKKKKKKK

SEQ ID NO: 319 - protein, 230 aa, Homo sapiens
  SITE (150): Xaa equals any of the naturally occurring L-amino acids
  SITE (194): Xaa equals any of the naturally occurring L-amino acids
  SITE (227): Xaa equals any of the naturally occurring L-amino acids
MSFLCSWLLFAMAWWLIAFAHGDLAPSEGTAEPCVTSIHSFSSAFLFSIEVQVTIGFGGRMVTEECPLAILILIVQNIVGLMINAIMLGCIFMKTAQAHRRAETLIFSKHAVIALRHGRLCFMLRVGDLRKSMIISATIHMQVVRKTTSXEGEVVPLHQVDIPMENGVGGNSIFLVAPLIIYHVIDANSPLYDXAPSDLHHHQDLEIIVILEGVVETTGITTQARPXTWR

SEQ ID NO: 320 - protein, 145 aa, Homo sapiens
GPQPTGSSDPRLSPRAPAQAQRAHGQGQAQVQHLSRFPVLSHGLSGPPHACVHTDHVVCSPARAWCEAGPASAQPPPAAHPGCYKALVTMLFLASAGTCTGLFLSLLLPTQFRTGSPLSPAQGCRGCGRYWALELCVQPVLGPHD

SEQ ID NO: 321 - protein, 97 aa, Homo sapiens; identical to SEQ ID NO: 219

SEQ ID NO: 322 - protein, 218 aa, Homo sapiens; identical to SEQ ID NO: 220

SEQ ID NO: 323 - protein, 83 aa, Homo sapiens [sequence omitted]

SEQ ID NO: 324 - protein, 672 aa, Homo sapiens; identical to SEQ ID NO: 214

SEQ ID NO: 325 - protein, 34 aa, Homo sapiens
MAWLAKLLPASIKVGSEPVVRALRRCMVVVGGST

SEQ ID NO: 326 - protein, 109 aa, Homo sapiens; identical to SEQ ID NO: 223

SEQ ID NO: 327 - protein, 83 aa, Homo sapiens
  SITE (11): Xaa equals any of the naturally occurring L-amino acids
  SITE (12): Xaa equals any of the naturally occurring L-amino acids
  SITE (39): Xaa equals any of the naturally occurring L-amino acids
  SITE (45): Xaa equals any of the naturally occurring L-amino acids
LKTVPMVASVXXGWTQPWTGMWLPPTLSRQPCLLSAPAXPRAYVXWGDWGSLFEECSSLSAMGQDSFAMAPPRGKSVQADKGS

SEQ ID NO: 328 - protein, 331 aa, Homo sapiens; identical to SEQ ID NO: 225

SEQ ID NO: 329 - protein, 105 aa, Homo sapiens; identical to SEQ ID NO: 226

SEQ ID NO: 330 - protein, 89 aa, Homo sapiens
  SITE (79): Xaa equals any of the naturally occurring L-amino acids
  SITE (84): Xaa equals any of the naturally occurring L-amino acids
  SITE (86): Xaa equals any of the naturally occurring L-amino acids
  SITE (87): Xaa equals any of the naturally occurring L-amino acids
MGAPWGQPSVAHHTLLFFFFFFEMESCSVAQAGVHLPDVSSLQPPPPGFKRFSCLSLLSSWDYRCAPTHPANFCICRRXGVSPXWXXWC

SEQ ID NO: 331 - protein, 49 aa, Homo sapiens
  SITE (12): Xaa equals any of the naturally occurring L-amino acids
  SITE (14): Xaa equals any of the naturally occurring L-amino acids
  SITE (16): Xaa equals any of the naturally occurring L-amino acids
  SITE (21): Xaa equals any of the naturally occurring L-amino acids
  SITE (22): Xaa equals any of the naturally occurring L-amino acids
  SITE (37): Xaa equals any of the naturally occurring L-amino acids
  SITE (49): Xaa equals any of the naturally occurring L-amino acids
ICPSPGCLLLLXPXFXPEDFXXLPPPFFGIPGLPCPXLLVRCFPIGGPX

SEQ ID NO: 332 - protein, 205 aa, Homo sapiens
MAPLALHLLVLVPILLSLVASQDWKAERSQDPFEKCMQDPDYEQLLKVVTWGLNRTLKPQRVIVVGAGVAGLVAAKVLSDAGHKVTILEADNRIGGRIFTYRDQNTGWIGELSHAHAQLSQDPPQALPGPGAQPDQVHPVRQEHVDGGARSEAAQLCGGEGAREAGLRLASPGKGPLARRHLPDGSQPGPQRPQGTGLQKGDEEV

SEQ ID NO: 333 - protein, 556 aa, Homo sapiens
  SITE (94): Xaa equals any of the naturally occurring L-amino acids
DSGGQWRGPRCPAVTKSWRHHLPPRVMAPLALHLLVLVPILLSLVASQDWKAERSQDPFEKCMQDPDYEQLLKVTILEADNRIGGRIFTYRDQXTGWIGELGAMRMPSSHRILHKLCQGLGLNLTKFTQYDKNTWTEVHEVKLRNYVVEKVPEKLGYALRPQEKGHSPEDIYQMALNQALKDLKALGCRKAMKKFERHTLLEYLLGEGNLSRPAVQLLGDVMSEDGFFYLSFAEALRAHSCLSDRLQYSRIVGGWDLLPRALLSSLSGLVLLNAPVVAMTQGPHDVHVQIETSPPARNLKVLKADVVLLTASGPAVKRITFSPPLPRHMQEALRRLHYVPATKVFLSFRRPFWREEHIEGGHSNTDRPSRMIFYPPPREGALLLASYTWSDAAAAFAGLSREEALRLALDDVAALHGPVVRQLWDGTGVVKRWAEDQHSQGGFVVQPPALWQTEKDDWTVPYGRIYFAGEHTAYPHGWVETAVKSALRAAIKINSRKGPASDTASPEGHASDMEGQGHVHGVASSPSHDLAKEEGSHPPVQGQLSLQNTTHTRTSH

SEQ ID NO: 334 - protein, 173 aa, Homo sapiens
MAPLALHLLVLVPILLSLVASQDWKAERSQDPFEKCMQDPDYEQLLKVVTWGLNRTLKPQRVIVVGAGVAGLVAAKVLSDAGHKVTILEADNRIGGRIFTYRDQNTGWIGELGAMRMPSSHRILHKLCQGLGLNLTKFTQYDKNTWTEVHEVKLRNYVVEKVPEKLGYALRPQ

SEQ ID NO: 335 - protein, 127 aa, Homo sapiens
MLLPLLLSSLLGGSQAMDGRFWIRVQESVMVPEGLCISVPCSFSYPRQDWTGSTPAYGYWFKAVTETTKGAPVATNHQSREVEMSTRGRFPGSLGDPAKGNCSLVIRRRADARMSHSTSFGWREEAM

SEQ ID NO: 336 - protein, 346 aa, Homo sapiens
  SITE (252): Xaa equals any of the naturally occurring L-amino acids
  SITE (309): Xaa equals any of the naturally occurring L-amino acids
MLLPLLLSSLLGGSQAMDGRFWIRVQESVMVPEGLCISVPCSFSYPRQDWTGSTPAYGYWFKAVTETTKGAPVATNHQSREVEMSTRGRFQLTGDPAKGNCSLVIRDAQMQDESQYFFRVERGSYVRYNFMNDGFFLKVTALTQKPDVYIPETLEPGQPVTVICVFNWAFEECPPPSFSWTGAALSSQGTKPTTSHFSVLSFTPRPQDHNTDLTCHVDFSRKGVSVQRTVRLRVAYAPRDLVISISRDNTPXLEPQPQGNVPYLEAQKGQFLRLLCAADSQPPATLSWVLQNRVLSSSHPWGPRPLGLXLPGVKAGDSGATPAERRTGLAPSSEPWTSLCSILQRT

SEQ ID NO: 337 - protein, 710 aa, Homo sapiens
QACLRQALRLLCGDATATAAVLAAGRVPGYGWEILDTSAGVSDGAGGLCISVPCSFSYPRQDWTGSTPAYGYWFKAVTETTKGAPVATNHQSREVEMSTRGRFQLTGDPAKGNCSLVIRDAQMQDESQYFFRVERGSYVRYNFMNDGFFLKVTALTQKPDVYIPETLEPGQPVTVICVFNWAFEECPPPSFSWTGAALSSQGTKPTTSHFSVLSFTPRPQDHNTDLTCHVDFSRKGVSAQRTVRLRVAYAPRDLVISISRDNTPALEPQPQGNVPYLEAQKGQFLRLLCAADSQPPATLSWVLQNRVLSSSHPWGPRPLGLELPGVKAGDSGRYTCRAENRLGSQQRALDLSVQYPPENLRVMVSQANRTVLENLGNGTSLPVLEGQSLCLVCVTHSSPPARLSWTQRGQVLSPSQPSDPGVLELPRVQVEHEGEFTCHARHPLGSQHVSLSLSVHYSPKLLGPSCSWEAEGLHCSCSSQASPAPSLRWWLGEELLEGNSSQDSFEVTPSSAGPWANSSLSLHGGLSSGLRLRCEAWNVHGAQSGSILQLPDKKGLISTAFSNGAFLGIGITALLFLCLALIIMKILPKRRTQTETPRPRFSRHSTILDYINVVPTAGPLAQKRNQKATPNSPRTPLPPGAPSPESKKNQKKQYQLPSFPEPKSSTQAPESQESQEELHYATLNFPGVRPRPEARMPKGTQADYAEVKFQ

SEQ ID NO: 338 - protein, 146 aa, Homo sapiens; identical to SEQ ID NO: 230

SEQ ID NO: 339 - protein, 110 aa, Homo sapiens; identical to SEQ ID NO: 231

SEQ ID NO: 340 - protein, 168 aa, Homo sapiens; identical to SEQ ID NO: 232

SEQ ID NO: 341 - protein, 227 aa, Homo sapiens
MAGVGAGPLRAMGRQALLLLALCATGAQGLYFHIGETEKRCFIEEIPDETMVIGNYRTQMWDKQKEVFLPSTPGLGMHVEVKDPDGKVVLSRQYGSEGRFTFTSHTPGDHQICLHSNSTRMALFAGGKLRVHLDIQVGEHANNYPEIAAKDKLTELQLRARQLLDQVEQIQKEQDYQRYREERFRLTSESTNQRVLWWSIAQTVILILTGIWQMRHLKSFFEAKKLV

SEQ ID NO: 342 - protein, 57 aa, Homo sapiens
MAGVGAGPLRAMGRQALLLLALCATGAQGLYFHIGETEKRCFIEEIPDETMVIGQAG

SEQ ID NO: 343 - protein, 121 aa, Homo sapiens
  SITE (34): Xaa equals any of the naturally occurring L-amino acids
LSAFIMLCYQHHHPAPELFHLLKLKICTYFVLFXRWSLALLPRLERSGAISAHCTLRLSGSSDSPASASQVAGITGKCHHAWLIFVFLVETGFHHVGQAGLELLASGNPLPQPPKVLGLQA

SEQ ID NO: 344 - protein, 93 aa, Homo sapiens; identical to SEQ ID NO: 235

SEQ ID NO: 345 - protein, 93 aa, Homo sapiens; identical to SEQ ID NO: 235

SEQ ID NO: 346 - protein, 48 aa, Homo sapiens
SLLSKLVMYYRYNCTKIVQPKTICNCLLFYCILFVFLRPLIAFCNLMA

SEQ ID NO: 347 - protein, 206 aa, Homo sapiens
MDPFVVLVLCLSFLLLLSLWRQRSARGNLPPGPTPLPIIGNYHLIDMKDIGQCLTNFSKIYGPVFTLYFGSQPIVILHGYEAMKEAFIDYGEEFSGRGRIPVFDKVSKGKGIGFSHGNVWKATRVFTVNTLRNLGMGKRTIETKVQEEAQWLMKELKKTNGSPCDPQFIIGCAPCNVICSIVFQNRFDYKDKDFLSLIGKVNECTE

SEQ ID NO: 348 - protein, 95 aa, Homo sapiens
MVFFLLLLFLREGLALSPRLECSSTIIAHYSLKFLDSSAPPISASPVAGTTACTTIPGYLFYFFVEMRSPCVAQAGLKHLDSRDPPASAKKKKKK

SEQ ID NO: 349 - protein, 310 aa, Homo sapiens
  SITE (212): Xaa equals any of the naturally occurring L-amino acids
  SITE (220): Xaa equals any of the naturally occurring L-amino acids
  SITE (265): Xaa equals any of the naturally occurring L-amino acids
  SITE (276): Xaa equals any of the naturally occurring L-amino acids
  SITE (284): Xaa equals any of the naturally occurring L-amino acids
  SITE (302): Xaa equals any of the naturally occurring L-amino acids
MMGSPVSHLLAGFCVWVVLGWVGGSVPNLGPAEQEQNHYLAQLFGLYGENGTLTAGGLARLLHSLGLGRVQGLRLGQHGPLTGRAASPAADNSTHRPQNPELSVDVWAGMPLGPSGWGDLEESKAPHLPRGPAPSGLDLLHRLLLLDHSLADHLNEDCLNGSQLLVNFGLSPAAPLTPRQFALLCPALLYQIDSRVCIGAPAPAPPGDLLSXLLQSALAXLLLSLPSPLSLLLLRLLGPRLLRPLLGFLGALAVGTLCGHATKPXSASGAPGYAPXASARAGAXAWGAGLKLGINLGWKNRXLAREQLKA

SEQ ID NO: 350 - protein, 99 aa, Homo sapiens
LLEGRQTIGPQKSEKQGTKVFGWGLLMLSDTIPLELRGQGQGQNPDILFFFQLPALLRPPEPLPTPHVLLQGLGLLLGGGLMLAITLLEERLLPVTTEG

SEQ ID NO: 351 - protein, 205 aa, Homo sapiens; identical to SEQ ID NO: 240

SEQ ID NO: 352 - protein, 167 aa, Homo sapiens; identical to SEQ ID NO: 242

SEQ ID NO: 353 - protein, 88 aa, Homo sapiens [sequence omitted]

SEQ ID NO: 354 - protein, 117 aa, Homo sapiens
MSHLGLHNSFFFFFLRWSFALVAQAGVQWCDLGSPQPPPPGFKQFSCLSLPSSWDYRCAPPCLANFVFLVETGFLHVGQAGLELLTSSDLSTSASQSAGITGVSHCSQQEFLFYSIG

SEQ ID NO: 355 - protein, 117 aa, Homo sapiens; identical to SEQ ID NO: 354

SEQ ID NO: 356 - protein, 196 aa, Homo sapiens
  SITE (64): Xaa equals any of the naturally occurring L-amino acids
  SITE (70): Xaa equals any of the naturally occurring L-amino acids
  SITE (191): Xaa equals any of the naturally occurring L-amino acids
MKLWVSALLMAWFGVLSCVQAEFFTSIGHMTDLIYAEKELVQSLKEYILVEEAKLSKIKSWANXMEALTXKSAADAEGYLAHPVNAYKLVKRLNTDWPALEDLVLQDSAAGFIANLSVQRQFFPTDEDEIGAAKALMRLQDTYRLDPGTISRGELPGTKYQAMLSVDDCFGMGRSAYNEGDYYHTVLWMEXVLKQL

SEQ ID NO: 357 - protein, 457 aa, Homo sapiens
  SITE (430): Xaa equals any of the naturally occurring L-amino acids
  SITE (438): Xaa equals any of the naturally occurring L-amino acids
  SITE (448): Xaa equals any of the naturally occurring L-amino acids
MKLWVSALLMAWFGVLSCVQAEFFTSIGHMTDLIYAEKELVQSLKEYILVEEAKLSKIKSWANKMEALTSKSAADAEGYLAHPVNAYKLVKRLNTDWPALEDLVLQDSAAGFIANLSVQRQFFPTDEDEIGAAKALMRLQDTYRLDPGTISRGELPGTKYQAMLSVDDCFGMGRSAYNEGDYYHTVLWMEQVLKQLDAGEEATTTKSQVLDYLSYAVFQLGDLHRALELTRRLLSLDPSHERAGGNLRYFEQLLEEEREKTLTNQTEAELATPEGIYERPVDYLPERDVYESLCRGEGVKLTPRRQKRLFCRYHHGNRAPQLLIAPFKEEDEWDSPHIVRYYDVMSDEEIERIKEIAKPKLARATVRDPKTGVLTVASYRVSKSSWLEEDDDPVVARVNRRMQHITGLTVKTAELLQVANYGVGGQYEPXFDFSRNDXRDTFKHLGTXNRVATFLNY

SEQ ID NO: 358 - protein, 97 aa, Homo sapiens
ANTFKHLGTGNRVATFLNYMSDVEAGGATVFPDLGAAIWPKKGTAVFWYNLLRSGEGDYRTRHAACPVLVGCKWVSNKWFHERGQEFLRPCGSTEVD

SEQ ID NO: 359 - protein, 180 aa, Homo sapiens
  SITE (131): Xaa equals any of the naturally occurring L-amino acids
  SITE (143): Xaa equals any of the naturally occurring L-amino acids
MDVGPSSLPHLGLKLLLLLLLLPLRGQANTGCYGIPGMPGLPGAPGKDGYDGLPGPKGEPGIPAIPGIRGPKGQKGEPGLPGHPGKNGPMGPPGMPGVPGPMGIPGEPGEEGRYKQKFQSVFTVTRQTHQXPAPNSLIRFNAXLTNPQGDYDTSTGKFTCKVPGLYYFVYHASHTANLCV

SEQ ID NO: 360 - protein, 112 aa, Homo sapiens
MDVGPSSLPHLGLKLLLLLLLLPLRGQANTGCYGIPGMPGLPGAPGKDGYDGLPGPKGEPGIPAIPGIRGPKGQIQAEIPVSVHGHSADPPAPCTQQPDQIQRGPHQPAGRL

SEQ ID NO: 361 - protein, 245 aa, Homo sapiens; identical to SEQ ID NO: 246

SEQ ID NO: 362 - protein, 245 aa, Homo sapiens; identical to SEQ ID NO: 246

SEQ ID NO: 363 - protein, 137 aa, Homo sapiens
MRRGRAGPGRAGGARSASWMSRLRALLGLGLLVAGSRLPRIKSQTIACRSGPTWWGPQRLNSGGRWDSEVMASTVVKYLSQEEAQAVDQELFNEYQFSVDQLMELAGLSCATAIAKAYPPTSMSRSPPTVLVICGPG

SEQ ID NO: 364 - protein, 307 aa, Homo sapiens; identical to SEQ ID NO: 247

SEQ ID NO: 365 - protein, 57 aa, Homo sapiens
KLREMVMQKNILLWTIFLKHKKNAQFCLHSLRMYLSEDQNKQSRCISTRQKPILKFP

SEQ ID NO: 366 - protein, 54 aa, Homo sapiens
MWRVPGTTRRPVTGESLGCTGQRHAAAAHACPPGGPHLGREDVWPWRRQVFQHH

SEQ ID NO: 367 - protein, 85 aa, Homo sapiens; identical to SEQ ID NO: 250

SEQ ID NO: 368 - protein, 334 aa, Homo sapiens; identical to SEQ ID NO: 251

SEQ ID NO: 369 - protein, 88 aa, Homo sapiens
  SITE (29): Xaa equals any of the naturally occurring L-amino acids
  SITE (40): Xaa equals any of the naturally occurring L-amino acids
  SITE (54): Xaa equals any of the naturally occurring L-amino acids
  SITE (55): Xaa equals any of the naturally occurring L-amino acids
  SITE (66): Xaa equals any of the naturally occurring L-amino acids
  SITE (85): Xaa equals any of the naturally occurring L-amino acids
AFKARSAFSVLFCFSFFFLAMRAKITEWXLKREVCFQLFXFARRWEGGDCCVLXXGMALLECVVHXHGCFCVLVASCCCFLLVWXSHT

SEQ ID NO: 370 - protein, 82 aa, Homo sapiens [sequence omitted]

SEQ ID NO: 371 - protein, 136 aa, Homo sapiens
  SITE (98): Xaa equals any of the naturally occurring L-amino acids
  SITE (123): Xaa equals any of the naturally occurring L-amino acids
MRMKYLWTSHMCVFASFGLCSPEIWELLLKSVHLYNPKRFWPGMMDELSELREFYDPDTVELMNWINSNTPRKAVFAGSMQLLAGVKLCTGRTLTNHXHYEDSSLRERTRAVYQIYAKRAPEXSACPPKVLRHWTT

SEQ ID NO: 372 - protein, 78 aa, Homo sapiens
LWLTASLPGRSKRPAAAAPRHSDLGGDNLKEWLCFLLTENPLDFASELAVRRPSKYNRSALNGLCLCDSQAPESPSLS

SEQ ID NO: 373 - protein, 107 aa, Homo sapiens [sequence omitted]

SEQ ID NO: 374 - protein, 146 aa, Homo sapiens
  SITE (12): Xaa equals any of the naturally occurring L-amino acids
  SITE (13): Xaa equals any of the naturally occurring L-amino acids
  SITE (144): Xaa equals any of the naturally occurring L-amino acids
MIISTIGEIALXXLNILGINFLGRRLSLSITMGCTALFCLLLNICTSSAGLIGFLFMLRALVAANFNTVYIYTAEVYPTTMRALGMGTSGSLCRIGAMVAPFISQVLMSASILGALCLFSSVCVVCAISAFTLPIETKGRALQXIK

SEQ ID NO: 375 - protein, 205 aa, Homo sapiens; identical to SEQ ID NO: 257

SEQ ID NO: 376 - protein, 125 aa, Homo sapiens
  SITE (20): Xaa equals any of the naturally occurring L-amino acids
  SITE (21): Xaa equals any of the naturally occurring L-amino acids
  SITE (26): Xaa equals any of the naturally occurring L-amino acids
MLPRGRPRALGAAALLLLLXXLGFLXFGGDLGCERREPGGRAGAPGCFPGPLMPRVPPDGRLRRAAALDGDPGAGPGDHNRSDCGPQPPPPPKCEVGARGPGGGSPGGAAPEPGLLDICGNHSTW

SEQ ID NO: 377 - protein, 99 aa, Homo sapiens; identical to SEQ ID NO: 259

SEQ ID NO: 378 - protein, 135 aa, Homo sapiens
MAWWPNSTCWLLTAVTMALATRCVPQELPSGSEVPGLEAVQVVRSGLAGPHRCSCRHPVLALTGGRDTQGPGASGPVLQWPPLLSQRVQAWLLKAMCLRLTLKRACQAAPGGSSHGGRCPAVCWPPGGRDGRGAA

SEQ ID NO: 379 - protein, 82 aa, Homo sapiens; identical to SEQ ID NO: 261

SEQ ID NO: 380 - protein, 370 aa, Homo sapiens
  SITE (156): Xaa equals any of the naturally occurring L-amino acids
RRGAGLRLHQPTRSQPCTQRDVKDALSRVQAAPACWLACPPACSTRPACSMTLWNGVLPFYPQPRHAAGFSVPLLIVILVFLALAASFLLILPGIRGHSRWFWLVRVLLSLFIGAEIVAVHFSAEWFVGTVNTNTSYKAFSAARVTARVGLLVGLXGINITLTGTPVHQLNETIDYNEQFTWRLKENYAAEYANALEKGLPDPVLYLAEKFTPSSPCGLYHQYHLAGHYASATLWVAFCFWLLSNVLLSTPAPLYGGLALLTTGAFALFGVFALASISSVPLCPLRLGSSALTTQYGAAFWVTLATGVLCLFLGGAVVSLQYVRPSALRTLLDQSAKDCSQERGGSPLILGDPLHKQAALPDLKCITTNL

SEQ ID NO: 381 - protein, 100 aa, Homo sapiens; identical to SEQ ID NO: 263

SEQ ID NO: 382 - protein, 59 aa, Homo sapiens
  SITE (8): Xaa equals any of the naturally occurring L-amino acids
FLQKECCXKMQHCPNISLCISKYFNVAFLGGLLILYMKNKIFVQEPKKKKKKKKKKKKK

SEQ ID NO: 383 - protein, 151 aa, Homo sapiens
MRRLLLVTSLVVVLLWEAGAVPAPKVPIKMQVKHWPSEQDPEKAWGARVVEPPEKDDQLVVLFPVQKPKLLTTEEKPRGQGRGPILPGTKAWMETEDTLGRVLSPEPDHDSLYHPPPEEDQGEERPRLWVMPNHQVLLGPEEDQDPIFPPQ

SEQ ID NO: 384 - protein, 151 aa, Homo sapiens; identical to SEQ ID NO: 264

SEQ ID NO: 385 - protein, 142 aa, Homo sapiens [sequence omitted]

SEQ ID NO: 386 - protein, 142 aa, Homo sapiens [sequence omitted]

SEQ ID NO: 387 - protein, 134 aa, Homo sapiens
  SITE (101): Xaa equals any of the naturally occurring L-amino acids
MLVTAYLAFVGLLASCLGLELSRCRAKPPGRACSNPSFLRFQLDFYQVYFLALAADWLQAPYLYKLYQHYYFLEGQIAILYVCGLASTVLFGLVASSLVDXLGRKNSCVLFSLTYSLCCLTKLSQDYFVLLVGR

SEQ ID NO: 388 - protein, 450 aa, Homo sapiens; identical to SEQ ID NO: 266

SEQ ID NO: 389 - protein, 125 aa, Homo sapiens
LFMLTFSTSPGQESPVESFIAFLLIELACGLYFPSMSFLRRKVIPETEQAGVLNWFRVPLHSLACLGLLVLHDSDRKTGTRNMFSICSAVMVMALLAVVGLFTVVRHDAELRVPSPTEEPYAPEL

SEQ ID NO: 390 - protein, 75 aa, Homo sapiens
WVPREKVATPGQQPPTLNYRQHRRPPGTAPALWAEKEGRLGEEEEVECRWRSASFCSRGFMGFKYDDAALRRCTV

SEQ ID NO: 391 - protein, 321 aa, Homo sapiens
MPLLGICALGLQAEGDHELLWGYKDEILSLIHVFRPDISPYFGLFYEKNGTNDGDYVFLTGEDSYLNFTKIVEWNGKTSLDWWITDKCNMINGTDGDSFHPLITKDEVLYVFPSDFCRSVYITFSDYESVQGLPAFRYKVPAEILANTSDNAGFCIPEGNCLGSGVLNVSICKNGAPIIMSFPHFYQADERFVSAIEGMHPNQEDHETFVDINPLTGIILKAAKRFQINIYVKKLDDFVETGDIRTMVFPVMYLNESVHIDKETASRLKSMINTTLIITNIPYIIMALGVFFGLVFTWLACKGQGSMDEGTADERAPLIRT

SEQ ID NO: 392 - protein, 449 aa, Homo sapiens
  SITE (372): Xaa equals any of the naturally occurring L-amino acids
  SITE (443): Xaa equals any of the naturally occurring L-amino acids
TWRTVRFSSFLGKCPTGWHHYEGTASCYRVYLSGENYWDAAQTCQRLNGSLATFSTDQELRFVLAQEWDQPERSFGWKDQRKLWVGYQYVITGRNRSLEGRWEVAFKGSSEVFLPPDPIFASAMSENDNVFCAQLQCFHFPTLRHHDLHSWHAESCYEKSSFLCKRSQTCVDIKDNVVDEGFYFTPKGDDPCLSCTCHGGEPEMCVAALCERPQGCQQYRKDPKECCKFMCLDPDGNSLFDSMASGMRLVVSCISSFLILSLLLFMVHRLRQRRRERIESLIGANLHHFNLGRRIPGFDYGPDGFGTGLTPLHLSDDGEGGTFHFHDPPPPYTAYKYPDIGQPDDPPPPYEASIHPDSVFYDPADDDAFEPXEVSLPAPGDGGSEGALLRRLEQPLPTAGASLADLEDSADSSSALLVPPDPAQSGSTPAAEALPGGGRHSRXSLNTVV

SEQ ID NO: 393 - protein, 62 aa, Homo sapiens
SHSRVSGSNQNCWQGDISMHKCDPQKVLVVFVTFCKAFFYIYFCAHFFLRFFRKQMYFKIYL

SEQ ID NO: 394 - protein, 42 aa, Homo sapiens
SFRNTVILNKPLPIHLSPIRCVFSTIKHLYCDLIKYIFGCSQ

SEQ ID NO: 395 - protein, 193 aa, Homo sapiens
SCCCSCCCCPSGAKPTQAATGSQGCPACPGHQGRMGTTDCRGPRGSQESQPFPGSEDPKGRYKQKFQSVFTVTRQTHQPPAPNSLIRFNAVLTNPQGDYDTSTGKFTCKVPGLYYFVYHASHTANLCVLLYRSGVKVVTFCGHTSKTNQVNSGGVLLRLQVGEEVWLAVNDYYDMVGIQGSDSVFSGFLLFPD

SEQ ID NO: 396 - protein, 186 aa, Homo sapiens
  SITE (5): Xaa equals any of the naturally occurring L-amino acids
  SITE (48): Xaa equals any of the naturally occurring L-amino acids
QKGWXSSGSSCRISGRCALSRMGESIFTVVYFGKEEINEVKGILENTXKAANFRNFTFIQLNGEFSRGKGLDVGARFWKGSNVLLFFCDVDIYFPSEFLNTCRLNTQPGKKVFYPVLFSQYNPGIIYGHHDAVPPLEQQLVIKKETGFWRDFGFGMTCQYRSDFINIGRTNLHLYCHPEATGPCRP
